(19) United States
(12) Patent Application Publication
(10) Pub. No.: US 2023/0323389 A1
(43) Pub. Date: Oct. 12, 2023

(54) SYNTHETIC MODIFIED VACCINIA ANKARA (SMVA) BASED CORONAVIRUS VACCINES

(71) Applicant: CITY OF HOPE, Duarte, CA (US)

(72) Inventors: Don J. DIAMOND, Glendora, CA (US); Felix WUSSOW, Glendora, CA (US); Flavia CHIUPPESI, Duarte, CA (US)

(73) Assignee: CITY OF HOPE, Duarte, CA (US)

(21) Appl. No.: 17/999,170

(22) PCT Filed: May 17, 2021
(86) PCT No.: PCT/US2021/032821

§ 371 Date: Nov. 17, 2022

Related U.S. Application Data
(60) Provisional application No. 63/026,127, filed on May 17, 2020.
(60) Provisional application No. 63/044,033, filed on Jun. 25, 2020.
(60) Provisional application No. 63/113,810, filed on Nov. 13, 2020.
(60) Provisional application No. 63/161,371, filed on Mar. 15, 2021.

(51) Int. Cl. C12N 15/86; A61P 31/14; C07K 14/005; A61K 39/215

(52) U.S. Cl. CPC C12N 15/86; A61K 39/215; A61P 31/14; C07K 14/005; A61K 2039/53

(57) ABSTRACT

Disclosed are synthetic modified vaccinia ankara (MVA)-based vaccines for preventing or treating coronavirus infections and methods of producing the vaccines. Specifically, the disclosure provides a vaccine composition comprising: (i) a single synthetic DNA fragment or two or more synthetic DNA fragments comprising the entire genome of an MVA, and (ii) one or more DNA sequences encoding one or more coronavirus antigens, subunits, or fragments thereof, inserted in one or more insertion sites of the MVA for preventing or treating coronavirus infections.

### PRIORITY CLAIM

[0001] This application claims priority to U.S. Provisional Pat. Application No. 63/026,127, filed May 17, 2020, U.S. Provisional Pat. Application No. 63/044,033, filed Jun. 25, 2020, U.S. Provisional Pat. Application No. 63/113,810, filed Nov. 13, 2020, and U.S. Provisional Pat. Application No. 63/161,371, filed Mar. 15, 2021, the contents of which are hereby incorporated by reference in their entireties.

### BACKGROUND

[0002] Modified Vaccinia Ankara (MVA) is a highly attenuated orthopoxvirus that was derived from its parental strain Chorioallantois Vaccinia Ankara (CVA) by 570 passages on chicken embryo fibroblasts (CEF). As a result of the attenuation process MVA has acquired six major genome deletions (Del1-6) as well as multiple shorter deletions, insertions, and point mutations, leading to gene fragmentation, truncation, short internal deletions, and amino acid substitutions. MVA has severely restricted host cell tropism, allowing productive assembly only in avian cells, e.g., CEF and baby hamster kidney (BHK) cells, whereas in human and most other mammalian cells, MVA assembly is abortive due to a late block in virus assembly. Although non-pathogenic and highly attenuated, MVA maintains excellent immunogenicity as demonstrated in various animal models and humans. In the late phase of the smallpox eradication campaign, MVA was used as a priming vector for the replication competent vaccinia-based vaccine in over 120,000 individuals in Germany and no adverse events were reported. In the past decades, MVA has been developed as a stand-alone smallpox vaccine and is currently pursued by the United States (US) government as a safer alternative to substitute the existing vaccinia-based vaccine stocks as a preventative countermeasure in case of a smallpox outbreak. The FDA approved MVA, under the trade name Jynneos (Bavarian Nordic) on Sep. 24, 2019 to prevent both smallpox and monkey pox. Previously, a similar MVA vaccine using the trade name Imvamune was approved in Europe as a smallpox vaccine. Almost all organizations that we are aware of which currently use MVA vectors or derivatives thereof are licensed or owned by academic, commercial, or governmental entities, which greatly restricts their use to commercially develop MVA-based vaccine vectors.

[0003] Coronaviruses are a large family of enveloped, positive-sense single stranded RNA viruses that can infect people and cause serious infections and even pandemics. Such highly infectious coronaviruses include, for example, MERS-CoV, SARS-CoV, and SARS-CoV-2. Since the recent outbreak of the novel severe acute respiratory syndrome coronavirus-2 (SARS-CoV-2, also known as Covid-19 or nCoV-2019) (PMC7095418, PMC7092803), the virus has spread to more than 200 countries, leading to over 3 million deaths worldwide. Although several effective SARS-CoV-2 vaccines have been developed with unprecedented pace and approved for emergency use, additional vaccines can contribute to establish long-term and cross-reactive immunity against SARS-CoV-2 and many of its emerging variants. Therefore, this disclosure provides vaccines using a synthetic MVA platform to satisfy an urgent need in the field.

### SUMMARY

[0004] In one aspect, disclosed herein is a vaccine composition for preventing or treating a virus infection such as coronavirus infection in a subject comprising: (i) a single DNA fragment comprising the entire genome of MVA, or two or more DNA fragments each comprising a partial sequence of the genome of the MVA such that the two or more DNA fragments, when expressed in the host cell upon co-transfection, are assembled sequentially and comprise the full-length sequence of the MVA genome, and (ii) one or more DNA sequences encoding one or more human coronavirus antigens, subunits, or fragments thereof inserted in one or more insertion sites of the MVA, wherein the antigens, subunits, or fragments thereof are expressed in the host cell upon transfection of the one or more DNA fragments. In certain embodiments, the DNA sequences of the antigens, subunits, or fragments thereof are codon optimized for expression in the host cell or vaccinia virus. In certain embodiments, the one or more human coronavirus antigens include the Spike (S) protein, the Nucleocapsid (N) protein, Membrane (M) protein, and Envelope (E) protein, papain-like protease, ORF1A, 3CL protease, ORF1B, endoribonuclease, matrix, helicase, or immunogenic fragments thereof. Other coronavirus antigens of the structural or non-structural (1a, 1b) proteins can be included as well. In certain embodiments, the one or more human coronavirus antigens include SARS-CoV-2 S protein, N protein, or both. In certain embodiments, the one or more antigens include a subunit of the S protein such as S1 and S2 domains, or the receptor-binding domain (RBD) of the S protein. In certain embodiments, the one or more antigens include a prefusion form of the S protein or N protein or a mutated S protein or N protein. For example, the prefusion form of the SARS-CoV-2 S protein can be stabilized or the SARS-CoV-2 S protein can be further stabilized by including a mutated Furin cleavage site such that amino acid residues 682-685 RRAR are mutated to GSAS. In another example, lysine 986 and valine 987 of the SARS-CoV-2 S protein are substituted with prolines (2P). Additional proline substitutions include F817P, A892P, A899P, and A942P. Similar Furin cleavage site mutations and proline substitutions can be included at the respective amino acid positions in other coronavirus S proteins to express uncleaved and/or 2P prefusion stabilized protein forms. In certain embodiments, the S protein comprises one or more of the mutations selected from the group consisting of S131, L18F, T19R, T20N, R21T, P26S, a deletion of histidine, and valine at positions 69 and 70, K77T, D80A, T95l, D138Y, G142D, a deletion of tyrosine at position 144, W152C, E154K, a deletion of glutamic acid and phenylalanine at amino acid position 156 and 157 (Del156-157), R158G, R190S, D215G, Q218H, a deletion of leucine, alanine, and leucine at position 242-244, R2461, K417N, K417T, N439K, L452R, Y453F, S477N, T478K, E484K, E484Q, S494P, N501Y, S520S, A570D, D614G, H655Y, P681H, P681R, RRAR682-685GSAS, A701V, T7161, D950N, S982A, K986P, V987P, T10271, Q1071H, H1101D, D1118H, and V1176F. In certain embodiments, the N protein comprises one or more of the mutations selected from the group consisting of D3L, P80R, S235F, R203K, R203M, G204R, T205l, and D377Y. In certain embodiments, the S protein and the N protein are fully mature or fully glycosylated. In certain embodiments, the S and N proteins are inserted in one or more MVA insertion sites. In certain embodiments, the one or more antigens comprise at least two RBDs from different variants of SARS-CoV-2, which can be linked by one or more GS linkers, and each of which can comprise a signal peptide at the N-terminus, or a transmembrane domain or a cytoplastic domain at the C-terminus. In certain embodiments, the one or more DNAfragments further comprise a virus promoter upstream of the DNA sequences encoding the human coronavirus antigens, subunits, or fragments thereof, a transcription termination signal downstream of the DNA sequences encoding the human coronavirus antigens, subunits, or fragments thereof, or both. In certain embodiments, the promoter sequences include mH5 and p7.5 promoters, or any other suitable native or synthetic vaccinia or poxvirus promoters. In certain embodiments, the DNA sequences encoding the antigens, subunits, or fragments thereof are inserted in one or more MVA insertion sites such as intergenic regions, non-essential genes and regions, and deletion sites. In certain embodiments, the vaccine composition further comprises a pharmaceutically acceptable carrier, adjuvant, additive or combination thereof. In certain embodiments, the subject is infected with or at a risk of being infected with a coronavirus such as a betacoronavirus, including MERS-CoV, SARS-CoV and SARS-CoV2, 229E, NL63, OC43, HKU1, and other alpha, beta, gamma, and delta coronaviruses. In certain embodiments, the subject is infected with or at a risk of being infected with SARS-CoV-2.

[0005] In another aspect, disclosed herein is a method of preventing or treating a viral infection in a subject comprising administering a prophylactically or therapeutically effective amount of a vaccine composition to the subject, wherein the vaccine comprises: (i) a single DNA fragment comprising the entire genome of an MVA, or two or more DNA fragments each comprising a partial sequence of the genome of the MVA such that the two or more DNA fragments, when expressed in the host cell upon co-transfection, are assembled sequentially and comprise the full-length sequence of the MVA genome, and (ii) one or more DNA sequences encoding one or more human coronavirus antigens, subunits, or fragments thereof inserted in one or more insertion sites of the MVA, wherein the antigens, subunits, or fragments thereof are expressed in the host cell upon transfection of the one or more DNA fragments. In certain embodiments, the DNA sequences of the antigens, subunits, or fragments thereof are codon optimized for expression in the host cell or vaccinia virus. In certain embodiments, the one or more human coronavirus antigens include the Spike (S) protein, the Nucleocapsid (N) protein, Membrane (M) protein, and Envelope (E) protein, papain-like protease, ORF1A, 3CL protease, ORF1B, endoribonuclease, matrix, helicase, or immunogenic fragments thereof. Other coronavirus antigens of the structural or non-structural (1a, 1b) proteins can be included as well. In certain embodiments, the one or more human coronavirus antigens include SARS-CoV-2 S protein, N protein, or both. In certain embodiments, the one or more antigens include a subunit of the S protein such as S1 and S2 domains, or the receptor-binding domain (RBD) of the S protein. In certain embodiments, the one or more antigens include a prefusion form of the S protein and a mutated S protein. For example, the prefusion form of the SARS-CoV-2 S protein can be stabilized or the SARS-CoV-2 S protein can be further stabilized by including a mutated Furin cleavage site such that amino acid residues 682-685 RRAR are mutated to GSAS (RRAR682-685GSAS). In another example, lysine 986 and valine 987 of the SARS-CoV-2 S protein are substituted with prolines (2P) (K986P and V987P). Additional proline substitutions include F817P, A892P, A899P, and A942P. Similar Furin cleavage site mutations and proline substitutions can be included at the respective amino acid positions in other coronavirus S proteins to express uncleaved and/or 2P prefusion stabilized protein forms. In certain embodiments, the S protein comprises one or more of the mutations selected from the group consisting of S131, L18F, T19R, T20N, R21T, P26S, a deletion of histidine, and valine at positions 69 and 70, K77T, D80A, T95l, D138Y, G142D, a deletion of tyrosine at position 144, W152C, E154K, a deletion of glutamic acid and phenylalanine at amino acid position 156 and 157 (Del156-157), R158G, R190S, D215G, Q218H, a deletion of leucine, alanine, and leucine at position 242-244, R246l, K417N, K417T, N439K, L452R, Y453F, S477N, T478K, E484K, E484Q, S494P, N501Y, S520S, A570D, D614G, H655Y, P681H, P681R, RRAR682-685GSAS, A701V, T7161, D950N, S982A, K986P, V987P, T10271, Q1071H, H1101D, D1118H, and V1176F. In certain embodiments, the N protein comprises one or more of the mutations selected from the group consisting of D3L, P80R, S235F, R203K, R203M, G204R, T2051, and D377Y. In certain embodiments, the S protein and the N protein are fully mature or fully glycosylated. In certain embodiments, the one or more antigens comprise at least two RBDs from different variants of SARS-CoV-2, which can be linked by one or more GS linkers, and each of which can comprise a signal peptide at the N-terminus, or a transmembrane domain or a cytoplastic domain at the C-terminus. In certain embodiments, the S and N proteins are inserted in one or more MVA insertion sites. In certain embodiments, the one or more DNA fragments further comprise a virus promoter upstream of the DNA sequences encoding the human coronavirus antigens, subunits, or fragments thereof, a transcription termination signal downstream of the DNA sequences encoding the human coronavirus antigens, subunits, or fragments thereof, or both. In certain embodiments, the promoter sequences include m H5 and p7.5 promoters, or any other suitable native or synthetic vaccinia or poxvirus promoters. In certain embodiments, the DNA sequences encoding the antigens, subunits, or fragments thereof are inserted in one or more MVA insertion sites such as intergenic regions, non-essential genes and regions, and deletion sites. In certain embodiments, the vaccine composition further comprises a pharmaceutically acceptable carrier, adjuvant, additive or combination thereof. In certain embodiments, the subject is infected with or at a risk of being infected with a coronavirus such as a betacoronavirus, including MERS-CoV, SARS-CoV and SARS-CoV2, 229E, NL63, OC43, HKU1, and other alpha, beta, gamma, and delta coronaviruses. In certain embodiments, the subject is infected with or at a risk of being infected with SARS-CoV-2.

[0006] In another aspect, disclosed herein is a method of eliciting an immune response in a subject comprising administering a prophylactically or therapeutically effective amount of a vaccine composition to the subject, wherein the vaccine comprises: (i) a single DNA fragment comprising the entire genome of an MVA, or two or more DNA fragments each comprising a partial sequence of the genome of the MVA such that the two or more DNA fragments, when expressed in the host cell upon co-transfection, are assembled sequentially and comprise the full-length sequence of the MVA genome, and (ii) one or more DNA sequences encoding one or more human coronavirus antigens, subunits, or fragments thereof inserted in one or more insertion sites of the MVA, wherein the antigens, subunits, or fragments thereof are expressed in the host cell upon transfection of the one or more DNA fragments. In certain embodiments, the DNA sequences of the antigens, subunits, or fragments thereof are codon optimized for expression in the host cell. In certain embodiments, the one or more human coronavirus antigens include the Spike (S) protein, the Nucleocapsid (N) protein, Membrane (M) protein, and Envelope (E) protein, papain-like protease, ORF1A, 3CL protease, ORF1B, endoribonuclease, matrix, helicase, or immunogenic fragments thereof. Other coronavirus antigens of the structural or non-structural (1a, 1b) proteins can be included as well. In certain embodiments, the one or more human coronavirus antigens include SARS-CoV-2 S protein, N protein, or both. In certain embodiments, the one or more antigens include a subunit of the S protein such as S1 and S2 domains, or the receptor-binding domain (RBD) of the S protein. In certain embodiments, the one or more antigens include a prefusion form of the S protein and a mutated S protein. For example, the prefusion form of the SARS-CoV-2 S protein can be stabilized or the SARS-CoV-2 S protein can be further stabilized by including a mutated Furin cleavage site such that amino acid residues 682-685 RRAR are mutated to GSAS. In another example, lysine 986 and valine 987 of the SARS-CoV-2 S protein are substituted with prolines (2P). Additional proline substitutions include F817P, A892P, A899P, and A942P. Similar Furin cleavage site mutations and proline substitutions can be included at the respective amino acid positions in other coronavirus S proteins to express uncleaved and/or 2P prefusion stabilized protein forms. In certain embodiments, the S protein comprises one or more of the mutations selected from the group consisting of S131, L18F, T19R, T20N, R21T, P26S, a deletion of histidine, and valine at positions 69 and 70, K77T, D80A, T951, D138Y, G142D, a deletion of tyrosine at position 144, W152C, E154K, a deletion of glutamic acid and phenylalanine at amino acid position 156 and 157 (Del156-157), R158G, R190S, D215G, Q218H, a deletion of leucine, alanine, and leucine at position 242-244, R246l, K417N, K417T, N439K, L452R, Y453F, S477N, T478K, E484K, E484Q, S494P, N501Y, S520S, A570D, D614G, H655Y, P681H, P681R, RRAR682-685GSAS, A701V, T7161, D950N, S982A, K986P, V987P, T10271, Q1071H, H1101D, D1118H, and V1176F. In certain embodiments, the N protein comprises one or more of the mutations selected from the group consisting of D3L, P80R, S235F, R203K, R203M, G204R, T2051, and D377Y. In certain embodiments, the S protein and the N protein are fully mature or fully glycosylated. In certain embodiments, the one or more antigens comprise at least two RBDs from different variants of SARS-CoV-2, which can be linked by one or more GS linkers, and each of which can comprise a signal peptide at the N-terminus, or a transmembrane domain or a cytoplastic domain at the C-terminus. In certain embodiments, the S and N proteins are inserted in one or more MVA insertion sites. In certain embodiments, the one or more DNA fragments further comprise a virus promoter upstream of the DNA sequences encoding the human coronavirus antigens, subunits, or fragments thereof, a transcription termination signal downstream of the DNA sequences encoding the human coronavirus antigens, subunits, or fragments thereof, or both. In certain embodiments, the promoter sequences include m H5 and p7.5 promoters, or any other suitable native or synthetic vaccinia or poxvirus promoters. In certain embodiments, the DNA sequences encoding the antigens, subunits, or fragments thereof are inserted in one or more MVA insertion sites such as intergenic regions, non-essential genes and regions, and deletion sites. In certain embodiments, the vaccine composition further comprises a pharmaceutically acceptable carrier, adjuvant, additive or combination thereof. In certain embodiments, the subject is infected with or at a risk of being infected with a coronavirus such as a betacoronavirus, including MERS-CoV, SARS-CoV and SARS-CoV2, 229E, NL63, OC43, HKU1, and other alpha, beta, gamma, and delta coronaviruses. In certain embodiments, the subject is infected with or at a risk of being infected with SARS-CoV-2.

[0007] In yet another aspect, this disclosure relates to a method of producing an MVA vector or a recombinant MVA vector. The method entails the steps of transfecting one or more DNA fragments into a host cell, wherein the one or more DNA fragments comprise the entire genomic DNA sequence of an MVA species, such that the MVA virus is reconstituted in the host cell. In certain embodiments, two or more DNA fragments are co-transfected into the host cell, each DNA fragment comprises a partial sequence of the MVA genome such that the two or more DNA fragments are assembled sequentially by homologous recombination and comprise the full-length sequence of the MVA genome when reconstituted in the host cell. In certain embodiments, the method further entails infecting the host cell with a helper virus before, during, or after the transfection of the one or more DNA fragments to initiate the transcription of the one or more DNA fragments. In certain embodiments, the helper virus is Fowl pox virus (FPV) or any other helper virus that stimulates MVA, vaccinia, or poxvirus transcription. In certain embodiments, the one or more DNA fragments are circularized before transfection or transfected in circular forms into the host cell. In certain embodiments, the one or more DNA fragments are cloned into a plasmid or a bacterial artificial chromosome (BAC) vector. In certain embodiments, the one or more DNA fragments are naturally derived, chemically synthesized, or a combination of naturally derived and chemically synthesized DNA fragments. In certain embodiments, the MVA genomic sequence comprises the sequence of Accession No. #U94848. In certain embodiments, two adjacent DNA fragments have an overlapping sequence to facilitate homologous recombination. In certain embodiments, the overlapping sequence is between about 100 bp and about 5000 bp in length. In certain embodiments, the one or more DNA fragments further comprise an inverted terminal repeat (ITR) region. In certain embodiments, the one or more DNA fragments further comprise an MVA terminal hairpin loop (HL) sequence, an MVA genome resolution (CR) sequence, or both, wherein the HL or the CR sequence is added to one or both ends of the DNA fragment as single stranded or double stranded DNA sequences in sense or antisense orientation. In certain embodiments, the one or more DNA fragments further comprise one or more HL sequences and one or more CR sequences. In certain embodiments, each HL sequence is flanked by two CR sequences at both ends of the HL sequence. In certain embodiments, the one or more DNA fragments further comprise one or more DNA sequences encoding one or more antigens, subunits, or fragments thereof. In certain embodiments, the DNA sequences of the antigens, subunits, or fragments thereof are codon optimized for expression in the host cell, e.g., in human cells or vaccinia virus, and/or codon optimized for stability in vaccinia by silent-codon alternation to avoid 4 or more of the same nucleotides consecutively. In certain embodiments, the one or more antigens include human coronavirus antigens such as the Spike (S) protein, the Nucleocapsid (N) protein, Membrane (M) protein, and Envelope (E) protein, papain-like protease, ORF1A, 3CL protease, ORF1B, endoribonuclease, matrix, helicase, or immunogenic fragments thereof. Other coronavirus antigens of the structural or non-structural (1a, 1b) proteins can be included as well. In certain embodiments, the one or more antigens include a subunit of the S protein such as S1 and S2 domains, or the receptor-binding domain (RBD) of the S protein. In certain embodiments, the one or more antigens include a prefusion form of the S protein and a mutated S protein. For example, the prefusion form of the SARS-CoV-2 S protein can be stabilized or the SARS-CoV-2 S protein can be further stabilized by including a mutated Furin cleavage site such that amino acid residues 682-685 RRAR are mutated to GSAS. In another example, lysine 986 and valine 987 of the SARS-CoV-2 S protein are substituted with prolines (2P). Additional proline substitutions include F817P, A892P, A899P, and A942P. Similar Furin cleavage site mutations and proline substitutions can be included at the respective amino acid positions in other coronavirus S proteins to express uncleaved and/or 2P prefusion stabilized protein forms. In certain embodiments, the S protein comprises one or more of the mutations selected from the group consisting of S13L, L18F, T19R, T20N, R21T, P26S, a deletion of histidine, and valine at positions 69 and 70, K77T, D80A, T95I, D138Y, G142D, a deletion of tyrosine at position 144, W152C, E154K, a deletion of glutamic acid and phenylalanine at amino acid position 156 and 157 (Del156-157), R158G, R190S, D215G, Q218H, a deletion of leucine, alanine, and leucine at position 242-244, R2461, K417N, K417T, N439K, L452R, Y453F, S477N, E484K, E484Q, S494P, N501Y, S520S, A570D, D614G, H655Y, P681H, P681R, RRAR682-685GSAS, A701V, T7161, D950N, S982A, K986P, V987P, T10271, Q1071H, H1101D, D1118H, and V1176F. In certain embodiments, the N protein comprises one or more of the mutations selected from the group consisting of D3L, P80R, S235F, R203K, R203M, G204R, T2051, and D377Y. In certain embodiments, the S protein and the N protein are fully mature or fully glycosylated. In certain embodiments, the one or more DNA fragments further comprise a virus promoter upstream of the DNA sequences of the antigens, subunits, or fragments thereof, a transcription termination signal downstream the DNA sequences of the antigens, subunits, or fragments thereof, or both. In certain embodiments, the promoter sequences include m H5 and p7.5 promoters, or any other suitable native or synthetic vaccinia or poxvirus promoters. In certain embodiments, the DNA sequences encoding the antigens, subunits, or fragments thereof are inserted in one or more MVA insertion sites such as intergenic regions, non-essential genes and regions, and deletion sites. In another embodiment, the one or more expressed SARS-CoV-2 antigens are further modified to contain one or more mutations of emerging variants of concern (VOC).

### BRIEF DESCRIPTION OF THE DRAWINGS

[0008] This application contains at least one drawing executed in color. Copies of this application with color drawing(s) will be provided by the Office upon request and payment of the necessary fees.

[0009] FIGS. 1A-1F show sMVA construction and characterization. FIG. 1A: Schematic of MVA genome. The MVA genome is about 178 kbp in length and contains about 9.6 kbp inverted terminal repeat (ITR) sequences. FIG. 1B: sMVA fragments. The three sub-genomic sMVA fragments (F1-F3) comprise about 60 kbp of the left, central, and right part of the MVA genome as indicated. sMVA F1/F2 and F2/F3 share about 3 kbp overlapping homologous sequences for recombination (red dotted crossed lines). Approximate genome positions of commonly used MVA insertion (Del2, IGR69/70, Del3) are indicated. FIG. 1C: Terminal CR/HL/CR sequences. Each of the sMVA fragments contains at both ends a sequence composition comprising a duplex copy of the MVA terminal hairpin loop (HL) flanked by concatemeric resolution (CR) sequences. BAC = bacterial artificial chromosome vector. FIG. 1D: sMVA reconstitution. The sMVA fragments are isolated from the E. coli and co-transfected into BHK-21 cells, which are subsequently infected with FPV as a helper virus to initiate sMVA virus reconstitution. FIG. 1E: PCR analysis. CEF infected with sMVA, derived with FPV HP1.441 (sMVA hp) or TROVAC from two independent virus reconstitutions (sMVA tv1 and sMVA tv2), were investigated by PCR for several MVA genome positions (ITR sequences, transition left or right ITR into internal unique region (left ITR/UR; UR/right ITR), Del2, IGR69/70 and Del3 insertion sites, and F1/F2 and F2/F3 recombination sites) and absence of BAC vector sequences. PCR reactions with wtMVA-infected and uninfected cells, without sample (mock), or with MVA BAC were performed as controls. FIG. 1F: Restriction fragment length analysis. Viral DNA isolated from purified sMVA (sMVA tv1 and sMVA tv2) or wtMVA virus was compared by Kpnl and Xhol restriction enzyme digestion.

[0010] FIGS. 2A-2D show sMVA replication properties. The replication properties of sMVA derived with FPV HP1.441 (sMVA hp) or TROVAC from two independent sMVA virus reconstitution (sMVA tv1 and sMVA tv2) were compared with wtMVA. FIG. 2A: Viral foci. CEF infected at low multiplicity of infection (MOI) with the reconstituted sMVA virus or wtMVA were immunostained using anti-Vaccinia polyclonal antibody (αVAC). FIG. 2B: Replication kinetics. BHK-21 or CEF cells were infected at 0.02 MOI with sMVA or wtMVA and viral titers of the inoculum and infected cells at 24 and 48 hours post infection were determined on CEF. Mixed-effects model with the Geisser-Greenhouse correction was applied; at 24 and 48 hours post-infection differences between groups were not significant. FIG. 2C: Viral foci size analysis. BHK-21 or CEF cell monolayers were infected at 0.002 MOI with sMVA or wtMVA and areas of viral foci were determined at 24 hours post infection following immunostaining with αVAC antibody. FIG. 2D: Host cell range analysis. Various human cell lines (HEK293, A549, 143b, and HeLa), CEF or BHK-21 cells were infected at 0.01 MOI with sMVA or wtMVA and virus titers were determined at 48 hours post infection on CEF. Dotted lines indicate the calculated virus titer of the inoculum based on 0.01 MOI. Differences between groups in FIGS. 2C-2D were calculated using one-way ANOVA followed by Tukey’s (2C) or Dunnett’s (2D) multiple comparison tests. ns = not significant.

[0011] FIGS. 3A-3D demonstrate sMVA in vivo immunogenicity. sMVA derived either with FPV HP1.441 (sMVA hp) or TROVAC from two independent virus reconstitution (sMVA tv1 and sMVA tv2) was compared by in vitro analysis with wtMVA. C57BL/6 mice were immunized twice at three-week interval with low (1×10⁷ PFU) or high (5×10⁷ PFU) dose of sMVA or wtMVA. Mock-immunized mice were used as controls. FIG. 3A: Binding antibodies. MVA-specific binding antibodies (IgG titer) stimulated by sMVA or wtMVA were measured after the first and second immunization by ELISA. FIG. 3B: NAb responses. MVA-specific NAb titers induced by sMVA or wtMVA were measured after the booster immunization against recombinant wtMVA expressing a GFP marker. FIGS. 3C-3D: T cell responses. MVA-specific IFNγ, TNFα, IL-4, and IL-10-secreting CD8+ (3C) and CD4+ (3D) T cell responses induced by sMVA or wtMVA after two immunizations were measured by flow cytometry following ex vivo antigen stimulation using B8R immunodominant peptides. Differences between groups were evaluated using one-way ANOVA with Tukey’s multiple comparison test. ns = not significant.

[0012] FIGS. 4A-4D demonstrate sMVA immunogenicity in vivo. sMVA derived either with FPV strain HP1.441 (sMVA hp) or with FPV strain TROVAC from two independent virus reconstitution (sMVA tv1 and sMVA tv2) was compared by in vitro analysis with wtMVA. C57BL/6 mice (N=4) were immunized twice in a three-week interval with low (1×10⁷ PFU) or high (5×10⁷ PFU) dose of sMVA or wtMVA. Mock-immunized mice were used as controls. FIG. 4A: Binding antibodies. Shown is the absorbance at 450 nm at different serum dilutions of MVA-specific binding antibodies (IgG titer) measured by ELISA after the first and second immunization in mice receiving sMVAor wtMVA. FIG. 4B: NAb responses. MVA-specific NAb titers induced by sMVA or wtMVA were measured after the booster immunization against wtMVA expressing a GFP marker. Shown is the measured GFP area of infected cells in square pixels (pix²×10³) at different serum dilutions. FIGS. 4C-4D: T cell responses. MVA-specific CD8+ (4C) and CD4+ (4D) T cells expressing IFNγ, TNFα, IL-4, and IL-10 were measured after two immunizations with sMVA or wtMVA by flow cytometry following ex vivo antigen stimulation using Vaccinia A19L immunodominant peptides. Differences between groups were evaluated using one-way ANOVA with Tukey’s multiple comparison test. ns = not significant.

[0013] FIGS. 5A-5E show construction and characterization of sMVA-CoV2 vectors. FIG. 5A: Schematic representation of vector construction. S and N antigen sequences (red spheres and green triangles) were inserted into sMVA fragments F2 and F3 by bacterial recombination methods in E. coli. The modified sMVA fragments of F1 and F2 with inserted antigen sequences and the unmodified sMVA fragment F1 were isolated from E. coli and co-transfected into FPV-infected BHK-21 cells to initiate virus reconstitution. FIG. 5B: Schematics of single (sMVA-S, sMVA-N) and double (sMVA-N/S, sMVA-S/N) recombinant sMVA-CoV2 vectors with S and N antigen sequences inserted into commonly used MVA insertion sites (Del2, IGR69/70, Del3). All antigens were expressed via the Vaccinia mH5 promoter. ITR represents inverted terminal repeat. FIG. 5C: PCR analysis. CEFs infected with the sMVA-CoV2 vectors were evaluated by PCR with primers specific for the Del2 and Del3 insertion sites harboring the N and S antigen sequences or primers specific for the F1/F2 and F2/F3 recombination sites. FIG. 5D: Western Blot. BHK-21 cells infected with the single and double recombinant sMVA-CoV2 vectors derived with FPV HP1.441 (sMVA-S/N hp, sMVA-N/S hp) or TROVAC (sMVA-S/N tv, sMVA-N/S tv, sMVA-S tv, sMVA-N tv) were evaluated for antigen expression by Western Blot using anti-S1 and N antibodies (αS1 and αN Abs). Vaccinia B5R protein was verified as infection control. Higher and lower molecular weight bands may represent mature and immature protein species. FIG. 5E: Flow cytometry staining. HeLa cells infected with the vaccine vectors were evaluated by cell surface and intracellular flow staining using anti-S1, S2, and N antibodies (αS1, αS2, and αN Abs). Live cells were used to evaluate cell surface antigen expression. Fixed and permeabilized cells were used to evaluate intracellular antigen expression. Anti-Vaccinia virus antibody (αVAC) was used as staining control to verify MVA protein expression. Cells infected with sMVA or wtMVA or uninfected cells were used as controls for experiments in C, D and E as indicated. The experiments in C, D, and E were performed twice with similar results.

[0014] FIGS. 6A-6D show in vitro characterization of sMVA-CoV2 vectors. FIGS. 6A-6C: Immunofluorescence imaging. S and N antigen expression by the single (sMVA-S and sMVA-N) and double (sMVA-S/N and sMVA-N/S) recombinant vaccine sMVA-CoV2 vectors, all derived with FPV HP1.441, was evaluated in BHK-21 (6A and 6B) or HeLa (6C) cells by immunofluorescent confocal imaging using N and S-specific antibodies. Fluorescently-conjugated wheat germ agglutinin (WGA) was used in 6B and 6C to stain the cell membrane. Magnified insets are found below images. Scale bars in 6A, 50 µm. Scale bars in 6B and 6C, 10 µm. All images represent two independent experiments with similar results. FIG. 6D: Flow cytometry dual staining. HeLa cells infected with the single (sMVA-N, sMVA-S) or double (sMVA-N/S, sMVA-S/N) recombinat sMVA-CoV2 vectors derived either with FPV TROVAC (tv) or HP1.441 (hp) were analyszed by intracellular flow cytometry anlayis using dual staining with mouse anti-S2 and rabbit anti-N monoclonal antibodies followed by anti-mouse Alexa Fluor 488 and anti-rabbit Alexa Fluor 647. Percentage of cells dually stained by the S and N-specific antibodies is indicated in the upper-right quadrant (Q2).

[0015] FIGS. 7A-7H demonstrate humoral immune responses stimulated by sMVA-CoV2 vectors. Balb/c mice immunized twice in a three-week interval with 5×10⁷ PFU of the single and double recombinant sMVA-CoV2 vectors derived with FPV HP1.441 (sMVA-S/N hp and sMVA-N/S hp) or TROVAC (sMVA-S/N tv, sMVA-N/S tv, sMVA-S tv, sMVA-N tv) were evaluated for SARS-CoV-2-specific humoral immune responses. FIGS. 7A-7B: Binding antibodies. S, RBD, and N-specific binding antibodies induced by the vaccine vectors were evaluated after the first (7A) and second (7B) immunization by ELISA. Dashed lines in 7A and 7B indicate median binding antibody endpoint titers measured in convalescent human sera (FIG. 9). One-way ANOVA with Tukey’s multiple comparison test was used to evaluate differences between binding antibody end-point titers. FIG. 7C: IgG2a/IgG1 isotype ratio. S-, RBD-, and N-specific binding antibodies of the IgG2a and IgG1 isotype were measured after the second immunization using 1:10,000 serum dilution, and absorbance reading was used to calculate IgG2a/IgG1 antibody ratio. One-way ANOVA with Dunnett’s multiple comparison test was used to compare each group mean IgG2a/IgG1 ratio to a ratio of 1 (balanced Th1/Th2 response). FIGS. 7D-7G: NAb responses. SARS-CoV-2-specific NAb (NT90 titer) induced by the vaccine vectors were measured after the first (7D, 7F) and second (7E, 7G) immunization against SARS-CoV-2 pseudovirus (pv) (7D-7E) or infectious authentic SARS-CoV-2 virus (7F-7G) in pooled sera of immunized mice. Shown is the average NT90 measured in duplicate (7D-7E) or triplicate (7F-7G) infection. N/A=failed quality control of the samples. Dotted lines indicate lowest antibody dilution included in the analysis. FIG. 7H: SARS-CoV-2/SARS-CoV-2pv correlation analysis. Correlation analysis of NT90 measured in mouse sera after one and two immunizations using infectious SARS-CoV-2 virus and SARS-CoV-2pv. Pearson correlation coefficient (r) was calculated in H. *p<0.05. ns= not significant.

[0016] FIGS. 8A-8G demonstrate humoral immune responses induced by the sMVA-CoV2 vectors. Shown are the antibody measurements in Balb/c mice (N=5) immunized twice in a three week interval with 5×10⁷ PFU of the single or double recombinant sMVA-CoV2 vectors derived with FPV HP1.441 (sMVA-S/N hp and sMVA-N/S hp) or TROVAC (sMVA-S/N tv, sMVA-N/S tv, sMVA-S tv, sMVA-N tv). FIGS. 8A-8B: Binding antibodies. Shown are S-, RBD-, and N-specific ELISA measurements at 450 nm using serial dilutions of serum collected two weeks post-prime (8A) or one-week post-boost (8B). FIG. 8C: IgG2a/IgG1 isotype ratio. Binding antibodies of the IgG2a and IgG1 isotypes were measured in serum of mice post-boost using a dilution of 1:10,000. FIGS. 8D-8G: NAb responses. Shown is the percent (%) of SARS-CoV-2pv (8D-8E) and infectious authentic SARS-CoV-2 (8F-8G) neutralization measured in sera pooled from each group of immunized mice. Shown is the average % neutralization in duplicate (8D-8E) or triplicate (8F-8G) infection measured at different serum dilutions. Vaccine groups immunized with sMVA tv and PBS (mock) were not included in the analysis shown in 8G because of failure of quality control. Dotted lines mark 90% neutralization that was used to calculate NT90 in FIG. 7.

[0017] FIGS. 9A-9C demonstrate SARS-CoV-2-specific humoral immune responses in convalescent immune sera. S-, RBD, and N-specific binding antibodies were measured via ELISA using serial dilutions of plasma samples from SARS-CoV-2 convalescent individuals. FIG. 9A: Binding antibody curves from individual samples (N=19). FIG. 9B: SARS-CoV-2 convalescent plasma binding curves were grouped together and compared to binding measured in samples (N=2) from SARS-CoV-2 negative individuals. FIG. 9C: Endpoint binding antibody titers to S, RBD, and N were calculated in individual plasma samples. Lines represent the median endpoint titers. Due to the limited number of SARS-CoV-2-negative samples evaluated, statistical analysis was not performed.

[0018] FIGS. 10A-10B demonstrate humoral immune responses induced by sMVA-CoV2 vectors. C57BL/6 Nramp1 mice (N=5) were immunized twice in a three week interval with 5×10⁷ PFU of the single and double recombinant sMVA-CoV2 vectors derived with FPV HP1.441 (sMVA-S/N hp and sMVA-N/S hp) or TROVAC (sMVA-S/N tv, sMVA-N/S tv, sMVA-S tv, sMVA-N tv) and evaluated for SARS-CoV-2-specific humoral immune responses. FIGS. 10A-10B: Binding antibodies. S, RBD, and N-specific binding antibodies induced by the vaccine vectors were evaluated two weeks after the first immunization (10A) and one week after the second immunization (10B) by ELISA. Dashed lines in 10A and 10B indicate median binding antibody endpoint titers that were measured in convalescent human sera (FIG. 9). Data in 10A, and 10B is presented as mean values +/- SD. One-way ANOVA with Tukey’s multiple comparison test was used to compare differences between binding antibody end-point titers in mice immunized with different vaccine vectors. FIG. 10C: IgG2c/IgG1 isotype ratio. S-, RBD-, and N-specific binding antibodies of the IgG2c and IgG1 isotype were measured after the second immunization using 1:10,000 serum dilution, and absorbance reading was used to calculate IgG2c/IgG1 antibody ratio. One-way ANOVA with Dunnett’s multiple comparison test was used to compare each group mean IgG2c/IgG1 ratio to a ratio of 1 (balanced Th1/Th2 response). Lines represent median values. *0.05<p<0.01, **0.01<p<0.001, ***0.001<p<0.0001, ****p<0.0001. ns=not significant.

[0019] FIG. 11 shows that the immune sera of Balb/c mice immunized with 5×10^7 PFU of the single and double recombinant sMVA-CoV2 vectors derived with FPV HP1.441 (sMVA-S/N hp and sMVA-N/S hp) or TROVAC (sMVA-S/N tv, sMVA-N/S tv, sMVA-S tv, sMVA-N tv) were evaluated for ADE effects. None of the sMVA-COV2 vectors induced antibody-dependent enhancement (ADE) of infection, including the parental isolate of the clinical strain COH04S1, sMVA-N/S tv. Neutralizing (1:5,000) and non-neutralizing (1:50,000) dilutions (as assayed on stably-transduced HEK293T cells expressing ACE2 (HEK/ACE2)) were evaluated to promote THP-1 monocyte infection by SARS-CoV-2 pseudovirus (pv) expressing luciferase. VSV-G pv was used as infection control. Relative light units (RLU) were measured in duplicates at 48 hours post infection. Dotted lines represent the negative control (average relative light units (RLU) measured in cells in the absence of pv). Dashed lines represent the positive control (average RLU measured in cells in the absence of serum and in the presence of pv). 2-way ANOVA with Dunnett’s multiple comparison test was used to compare each group and serum dilution to the mean RLU in the positive control. ns= not significant; *p<0.05.

[0020] FIGS. 12A-12D demonstrate cellular immune responses stimulated by sMVA-CoV2 vectors. Balb/c mice immunized twice in a three-week interval with 5×10⁷ PFU of the single or double recombinant sMVA-CoV2 vectors derived with FPV HP1.441 (sMVA-S/N hp and sMVA-N/S hp) or TROVAC (sMVA-S/N tv, sMVA-N/S tv, sMVA-S tv, sMVA-N tv) were evaluated for SARS-CoV-2-specific cellular immune responses. Antigen-specific CD8+ (12A and 12B) and CD4+ (12C and 12D) T cell responses induced by the vaccine vectors after two immunizations were evaluated by flow cytometry for IFNγ, TNFα, IL-4 and IL-10 secretion following ex vivo antigen stimulation using SARS-CoV-2 S and N-specific peptide libraries. Due to technical issues, 1-3 animals/group were not included in the CD4/TNFα analysis in 12C and 12D. One-way ANOVA with Tukey’s multiple comparison test was used to compare differences in % of cytokine-specific T-cells between groups. *p<0.05. ns=not significant.

[0021] FIGS. 13A-13C show flow cytometry gating strategy. FIG. 13A: Intracellular staining analysis of mouse splenocytes stimulated with S and N peptide libraries was performed using a hierarchical gating strategy that included lymphocytes>singlets>CD3⁺ T-cells>CD4⁺ T-cells and CD8⁺ T-cells>Cytokine positive cells. FIGS. 13B-13C: Example of gating on cytokine-positive CD8⁺ T-cells (13B) and CD4⁺ T-cells (13C). Splenocytes of a mouse immunized with double recombinant sMVA-CoV2 vector sMVA-N/S were either left untreated (no peptide) or stimulated 16 hours with S or N peptide pools. Numbers in each dot plot indicate the percentage of cells in gated areas.

[0022] FIG. 14 shows TNFα secretion by T-cells of sMVA-CoV2-immunized mice. Splenocytes from Balb/c mice immunized with 5×10⁷ PFU of the single and double recombinant sMVA-CoV2 vectors derived with FPV HP1.441 (sMVA-S/N hp and sMVA-N/S hp) or TROVAC (sMVA-S/N tv, sMVA-N/S tv, sMVA-S tv, sMVA-N tv) were evaluated for TNFα secretion. Mouse splenocytes were stimulated with S or N peptide libraries and 48 hours later TNFα was measured by ELISA in cell culture supernatants. Amounts of TNFα quantified in unstimulated samples were subtracted from each peptide-stimulated sample. *p<0.05 compared to mock-immunized mice using one-way ANOVA with Dunnett’s multiple comparison test.

[0023] FIGS. 15A-15E demonstrate humoral immune responses induced by sMVA-CoV2 vectors. SARS-CoV-2-specific humoral immune responses were evaluated in mice immunized with the single recombinant sMVA-CoV2 vectors sMVA-S and sMVA-N alone or in combination. Balb/c mice (N=5) were immunized twice in three-week interval with high (5×10⁷ PFU) or low (1×10⁷ PFU) dose of sMVA-S and sMVA-N. Co-immunization via the same immunization schedule with half of the high or low dose of each of the vaccine vectors was evaluated to assess SARS-CoV-2-specific immune stimulation to the S and N antigens by the vectors in combination. Mice immunized with empty sMVA vector or mock-immunized mice were used as controls. FIGS. 15A-15B: Binding antibodies. Antigen-specific binding antibodies to S, RBD, and N were determined after the first and second immunization by ELISA. Dashed lines indicate median binding antibody endpoint titers that were measured in convalescent human sera (FIG. 9). One-way ANOVA with Tukey’s multiple comparison test was used to compare differences between binding antibody end-point titers in mice immunized with different vaccine doses, and mice immunized with the vaccine vectors alone or combined. FIG. 15C: IgG2a/IgG1 isotype ratio. Ratio of IgG2a/IgG1 binding antibodies to S, RBD, and N was calculated after performing isotype-specific ELISA for the different antigens using post-boost serum from immunized mice. One-way ANOVA with Dunnett’s multiple comparison test was used to compare each group mean to a ratio of 1 (balanced Th1/Th2 response). FIGS. 15D-15E: NAb titers. SARS-CoV-2-specific NAb responses were measured after the second immunization in pooled sera by neutralization assay using SARS-CoV-2 pseudovirus. Shown in FIG. 15D are the neutralizing antibody titers to prevent 90% infection of SARS-CoV-2 pseudovirus (NT90). Dotted baseline represents the minimum dilution included in the analysis. Groups with NT90<baseline are shown at baseline. E shows % neutralization measured using serial dilutions of pooled sera. Dotted line in E marks 90% neutralization. *p<0.05.

[0024] FIGS. 16A-16B demonstrate cellular immune responses in vivo immunogenicity of sMVA-CoV2 vectors. SARS-CoV-2-specific cellular immune responses were evaluated in mice immunized with sMVA-CoV2 single recombinant vectors sMVA-S and sMVA-N alone or in combination. Balb/c mice (N=5) were immunized twice in three-week interval with high (5×10⁷ PFU) or low (1×10⁷ PFU) dose of sMVA-CoV2 single recombinant sMVA-S and sMVA-N. Co-immunization via the same immunization schedule with half of the high or low dose of each of the vaccine vectors was evaluated to assess SARS-CoV-2-specific immune stimulation to the S and N antigens by the vaccine vectors in combination. Mice immunized with empty sMVA vector or mock-immunized mice were used as controls. Antigen-specific CD8+ T cells expressing IFNγ, TNFα, and IL-2 and CD4+ T cell expressing IFNγ were evaluated by flow cytometry staining following ex vivo antigen stimulation using SARS-CoV-2-specific S and N peptide libraries. One-way ANOVA followed by Dunnett’s multiple comparison test was used to compare each group mean to the mean in mock-immunized mice. *p<0.05.ns=not significant.

[0025] FIG. 17 illustrates SARS-CoV-2 clinical candidate vaccine COH04S1, a synthetic MVA viral vector-based vaccine expressing SARS-CoV-2 S and N antigens (sMVA-N/S). The gene sequences encoding the S and N antigens are inserted into the Del3 and Del2 insertions sites as indicated. mH5 = modified Vaccinia H5 promotor; ITR = inverted terminsl repeats; UR = internal unique region.

[0026] FIG. 18 demonstrates that C46 (a.k.a. sMVA-S/N) induced potent binding antibody responses against SARS-CoV-2 in preclinical rodent models. Dashed lines indicate median binding antibody endpoint titers measured in convalescent human sera. The green diamonds represent C46 (a.k.a. sMVA-S/N), which is the sMVA-CoV2 double recombinant vaccine expressing both Spike and Nucleocapsid antigens. The blue circles represent sMVA-S, which is the single recombinant sMVA with Spike antigen only. The red squares represent sMVA-N, which is the sMVA-CoV2 single recombinant with Nucleocapsid antigen only. The brown inverted triangles represent sMVA viral vector without SARS-CoV-2 antigens. The navy triangles represent mock vaccination.

[0027] FIG. 19 demonstrates clinical candidate COH04S1 induced potent cellular (T Cell) immune responses in preclinical rodent models. Spike- and Nucleocapsid-specific IFNγ, TNFα, and IL-4 CD8+ and CD4+ responses induced by COH04S1 (C35, sMVA-N/S) were compared to responses induced by an sMVA-CoV2 single recombinant vaccine expressing only Spike (sMVA-S), empty control sMVA, mock immunized animals, and mice immunized with Spike admixed to Alum. COH04S1 clinical candidate induced robust Spike- and Nucleocapsid T cell responses.

[0028] FIG. 20 demonstrates humoral and cellular responses in C35 (sMVA-N/S) vaccinated mice indicating a Th1-response. Humoral and cellular responses in BALB/c mice immunized with clinical candidate COH04S1 (sMVA-N/S) were compared to responses induced by an sMVA expressing only Spike (sMVA-S), empty control sMVA, mock immunized animals, and mice immunized with Spike admixed to Alum. Spike/Alum immunized animals develop Th2 responses following vaccination as shown by IgG1 biased antibody responses and IL-4 biased T cell responses. Clinical candidate COH04S1 (sMVA-N/S) immunized mice presented a Th1 shifted humoral and cellular response.

[0029] FIG. 21 demonstrates clinical candidate COH04S1 induced potent SARS-CoV-2 neutralizing antibody response in preclinical rodent models using live SARS-CoV-2 in a plaque reduction assay on HeLa-ACE2 cells. *NT50/90 is the dilution of the (antibody-containing) serum showing 50/90% neutralization of infection.

[0030] FIG. 22 demonstrates clinical candidate COH04S1 elicited potent SARS-CoV-2-specific neutralizing antibodies (NAb) in mice using authentic SARS-CoV-2 virus on susceptible cells (VeroE6). Clinical candidate COH04S1-primed and prime-boosted mice serum was analyzed for neutralization of live SARS-CoV-2 and compared to neutralization in a pool of 35 human plasma samples from individuals with mild-to-severe SARS-CoV-2 infection.

[0031] FIG. 23 shows that the SARS-CoV2 vaccines based on sMVA did not induce antibody-dependent enhancement (ADE) of infection.

[0032] FIG. 24 shows that COH04S1 induced strong immune responses in mice following intraperitoneal (IP) and intranasal (IN) vaccinations. Clinical candidate COH04S1 was used to immunize Balb/c mice IP or IN. Clinical candidate COH04S1-induced responses were compared to humoral and cellular responses induced by Spike and Nucleocapid proteins admixed with Alum. Antibody responses post-prime and post-boost were evaluated by IgG and IgA RBD-ELISA and authentic SARS-CoV-2 virus neutralization assay. T cell responses were evaluated by IFNγ-ELISPOT after stimulation of splenoctyes with S- and N-specific peptide libraries.

[0033] FIGS. 25A-25D show CD8+ T-cell responses induced by SARS-CoV2 sMVA construct sMVA-N/S in HLA transgenic mice. HLA-B*07:02 (B7) transgenic mice (n = 4) were immunized twice in a 3-week interval with 1×10⁷ PFU of SARS-CoV2 sMVA construct sMVA-N/S or sMVA control vector (reconstituted with FPV TROVAC). B7 mice (n =3) were mock-immunized as additional control. Development of SARS-CoV-2-specific CD8+ T cells was evaluated one week post booster immunization. FIGS. 25A-25D show intracellular cytokine staining. Nucleocapsid- (25A and 25C) and Spike-specific (25B and 25D) CD8+ T cells were evaluated by intracellular cytokine staining for IFNγ, TNFα, and IL-4 secretion following ex vivo antigen stimulation by N and S peptide libraries, respectively. Panels 25A and 25B show the percentage of CD3+/CD8+ T cells secreting IFNγ, TNFα, or IL-4 following peptide stimulation. Panels 25C and 25D show relative frequencies of CD8+ T cells secreting one or more cytokines after peptide stimulation. Total percentage of cytokine-secreting cells within CD3+/CD8+ population is indicated under each pie chart. One-way ANOVA with Dunnett’s multiple comparison test was used in 25A and 25B. Data in 25A and 25B are presented as mean values ± SD; *0.05 < p < 0.01, **0.01 < p < 0.001, ***0.001 < p < 0.0001, ****p < 0.0001; ns = not significant.

[0034] FIG. 26 shows T cell responses in HLA-B*07:02 (B7) transgenic mice immunized with clinical candidate COH04S1 (sMVA-N/S). ELISPOT analysis of IFNγ-secreting cells was performed following stimulation with S and N peptide libraries, S library sub-pools (1S1, 2S1, S2), and N26 peptide containing the HLA-B*07:02-restricted N-specific immunodominant epitope SPRWYFYYL. Two-way ANOVA with Dunnett’s multiple comparison test was used. Data is presented as mean values ± SD; *0.05 < p < 0.01, **0.01 < p < 0.001, ***0.001 < p < 0.0001, ****p < 0.0001; ns = not significant.

[0035] FIG. 27 shows that aged mice developed comparable immune responses to young mice following prime-boost immunization with clinical candidate COH04S1. Clinical candidate COH04S1 was used to immunized young (8 weeks old), middle aged (40 weeks old), and aged (80 weeks old) C57BL/6 mice. Control animals were mice of similar age immunized with Spike and Nucleocapsid proteins admixed with Alum, and mock-immunized animals. Neutralizing antibodies were evaluated using SARS-CoV-2 Spike pseudovirus on HEK-293/Ace2 cells. T cell responses were measured using mouse IFNγ ELISPOT assay after stimulating mouse splenocytes with Spike peptide subpools (1S1, 2S1 and S2), and N peptides.

[0036] FIG. 28 shows the immunogenicity of clinical candidate COH04S1. COH04S1 shows comparable immunogenicity between sexes in Balb/C mice and demonstrates Th1 immunity compared to S/N/Alum to all antigens.

[0037] FIG. 29 illustrates the hamster clinical candidate COH04S1 vaccine study design.

[0038] FIG. 30 shows titers of binding antibodies induced by sMVA-SARS-CoV-2 vectors and clinical candidate COH04S1 clinical candidate in hamsters after intramuscular (IM) or intranasal (IN) immunization with 1×10^8 pfu of sMVA-CoV2 vaccine constructs. The sMVA-CoV2 vaccines used in the study were: C79 (S2P/N double recombinant with 2P Spike sequence); clinical candidate COH04S1 (C35/F4/B1, double plaque purified isolate of C35 double recombinant); C35/F4/D5 (double plaque purified isolate of C35 double recombinant); C46/C3/F10 (double plaque purified isolate of C46 double recombinant); C15 (single recombinant expressing Spike only); C35 (double recombinant, and parental clone of COH04S1 clinical isolate). The sMVA empty vector was used as a control.

[0039] FIG. 31 shows neutralizing antibodies (PRNT) induced by sMVA-SARS-CoV-2 vectors and COH04S1 clinical candidate in hamsters measured at day 42. The hamsters were primed at day zero and boosted at day 28 with 1×10^8 pfu of clinical candidate COH04S1 or sMVA- SARS-CoV-2 vectors intramuscularly or intranasally. Empty vector sMVA-immunized hamsters were used as a control. Antibodies neutralizing authentic SARS-CoV-2 virus were measured in vitro using Vero cells. PRNT assay was done at Bioqual (Gaithersburg, MD) using SARS-CoV-2, Isolate USA-WA1/2020. Day 42 serum samples were used for the analysis.

[0040] FIG. 32 shows body weight change of the hamsters which were immunized with sMVA-CoV2 vectors or COH04S1 and were challenged two weeks post-boost with 6×10^4 pfu of authentic SARS-CoV-2 virus, Isolate USA-WA1/2020. The weight changes were measured daily for 10 days. All sMVA-CoV2 vectors including COH04S1 prevented severe weight loss in challenged animals.

[0041] FIG. 33 shows body weight change of the hamsters immunized with sMVA-CoV2 vectors either intramuscularly or intranasally and which were challenged two weeks post-boost with 6×10^4 pfu of authentic SARS-CoV-2 virus, Isolate USA-WA1/2020. The weight changes were measured daily for 10 days. The animals were grouped by immunization route (top) or sex (bottom).

[0042] FIG. 34 shows binding antibodies and neutralizing antibodies induced by clinical candidate COH04S1 in hamsters. The hamsters were primed at day zero and boosted at day 28 with 1×10^8 pfu of clinical candidate COH04S1 intramuscularly or intranasally. Empty vector sMVA-immunized hamsters were used as a control. Shown are endpoint binding antibody titers (total IgG) to Spike, RBD and Nucleocapsid measured in immunized hamsters post-prime (day 28) and post-boost (day 42). Ratios of IgG⅔ and IgG1 immunoglobulin titer to Spike, RBD, and Nucleocapsid are shown and are indicative of a Th1-biased response in clinical candidate COH04S1-immunized hamsters. The serum antibodies neutralizing authentic SARS-CoV-2 virus were measured in vitro using Vero cells. PRNT assay was done at Bioqual using SARS-CoV-2, Isolate USA-WA1/2020. Day 42 serum samples were used for the analysis.

[0043] FIG. 35 shows successful protection of clinical candidate COH04S1-vaccinated hamsters from sub-lethal challenge with authentic SARS-CoV-2 virus. The hamsters were challenged two weeks post-boost with SARS-CoV-2, Isolate USA-WA1/2020 and the weight changes were measured daily for 10 days. Thick lines indicate median weight loss values. Thin lines indicate single animals’ weight loss.

[0044] FIG. 36 shows a viral load analysis at day 10 post-challenge. The lungs and turbinates wash were collected 10 days post-challenge and analyzed for the presence of SARS-CoV-2 genomic RNA (gRNA) (FIG. 36A) and sub-genomic RNA (sgRNA, FIG. 36B). Clinical candidate COH04S1 given either intramuscularly (IM) or intranasally (IN) successfully prevented SARS-CoV-2 virus replication in lungs and reduced viral load in nasal turbinates.

[0045] FIG. 37 shows strong immune responses induced by intramuscular (IM) and intranasal (IN) vaccinations with clinical candidate COH04S1 in ferrets. Binding antibodies were evaluated using S-, RBD-, and N-IgG ELISA. Titers of neutralizing antibodies were measured using authentic SARS-CoV-2 virus on VeroE6 cells. T cell IFNγ responses in ferret’ PBMCs were measured using ferrets IFNγ-ELISPOT.

[0046] FIG. 38 illustrates the clinical candidate COH04S1 study design in African Green Monkeys (AGMs). The AGMs were immunized once or twice with clinical candidate COH04S1. In the prime-only study (Study 2) animals were immunized with 2.5×10^8 pfu. In the prime-boost study (Study 1) the AGMs were immunized with 1×10^8 pfu.

[0047] FIG. 39 shows that the T cell responses were evaluated in clinical candidate COH04S1-immunized AGMs. The levels of IFNγ T cells recognizing Spike (S) and Nucleocapsid (N) were quantified by ELISPOT following stimulation of freshly isolated PBMC with S and N peptide libraries.

[0048] FIG. 40 shows Study 1 (prime-boost) cellular responses. The IFNγ, IL-2 and IL-4 responses to Spike (S), Nucleocapsid (N) and Membrane (M) proteins were measured in freshly isolated PBMCs from prime-boosted AGMs 2 weeks and 5 weeks post-boost (time of challenge) by ELISPOT.

[0049] FIG. 41 shows Study 2 (prime-only) cellular responses. IFNγ, IL-2 and IL-4 responses to Spike (S), Nucleocapsid (N) and Membrane (M) proteins were measured in freshly isolated PBMC from primed AGM 2 weeks and 5 weeks post-prime (time of challenge) by ELISPOT.

[0050] FIG. 42 shows genomic RNA (gRNA) quantification in broncho alveolar lavage (BAL) by qPCR at day 2 and day 4 post-challenge.

[0051] FIG. 43 shows viral load quantification in broncho alveolar lavage (BAL) by TCID50 endpoint dilution assay at days 2, 4, and 7 post-challenge for Study 1 and Study 2.

[0052] FIG. 44 shows comparison BAL viral loads (TCID50) post-challenge in mock, sMVA and clinical candidate COH04S1 primed and primed-boosted AGMs.

[0053] FIG. 45A shows S-, RBD- and N-specific binding antibodies endpoint titers in DL1 sentinels up to day 120. FIG. 45B shows S-, RBD- and N-specific binding antibodies endpoint titers in DL2 sentinels up to day 90. FIG. 45C shows S-, RBD- and N-specific binding antibodies endpoint titers in DL3 sentinels up to day 56.

[0054] FIG. 46 shows binding antibodies endpoint titers against S, RBD, and N measured in clinical candidate COH04S1 DL1/DL2/DL3 sentinels up to day 120 post-prime. Serum from 11 individuals who received two doses of the EUA Pfizer-BioNTech SARS-CoV-2 mRNA EUA vaccine based on Spike was analyzed at days 60 and 90 post-vaccine, and antibody titers from a pool of 35 SARS-CoV-2 convalescent individuals who had mild-to-severe SARS-CoV-2 symptoms prior to sample collection were included as a comparison. DL1=4 sentinels d120, DL2=5 sentinels d90, DL3=6 sentinels d56, EUA=14 samples d60, 12 samples d90, convalescents=35 samples.

[0055] FIG. 47 shows comparison of binding antibodies to Spike (Wuhan D614G strain) and Spike P.1 Brazilian variant of concern (VOC) quantified by ELISA in DL1, DL2 and DL3 sentinels over time (top). Day 56-60 ELISA endpoint titers measured against Wuhan D614G Spike and P.1 Spike in DL1/DL2/DL3 sentinels and EUA Pfizer/BioNTech vaccine recipients (bottom).

[0056] FIG. 48 shows neutralizing antibody titers measured using Spike-pseudoviruses from SARS-CoV-2 Wuhan strain with D614G mutation (D614G) and variants of concern (VOC) B.1.1.7 (UK), B.1.351 (RSA) and P.1 (BRA) in DL1, DL2, and DL3 sentinels up to 90 days post-prime immunization.

[0057] FIG. 49 shows the neutralizing antibody titers measured using Spike-pseudoviruses from SARS-CoV-2 Wuhan strain with D614G mutation (D614G) and variants of concern (VOC) B.1.1.7 (UK), B1.351 (RSA) and P.1 (BRA). DL1 and DL2 sentinels were evaluated at day 56, DL3 sentinels at day 42 or 56 when available, and EUA-Pfizer vaccine recipient at day 60.

[0058] FIG. 50 shows that healthy adults immunized with clinical candidate COH04S1 (DL1) developed functional T cell responses to S and N antigens in a preliminary analysis.

[0059] FIG. 51 shows the S-, N- and M-specific IFN-γ and IL-4 T cell responses measured in DL1 sentinels up to day 120, in DL2 sentinels up to day 90, and DL3 sentinels up to day 56 post-prime immunization with clinical candidate COH04S1 using an IFNγ/IL-4 fluorospot. PBMC were cultured in vitro for 48 hours in the presence of Spike, Nucleocapsid or Membrane peptide pools.

[0060] FIG. 52 shows that S-, N- and M-specific IFN-γ and IL-4 T cell responses measured in DL1, DL2 and DL3 sentinels up to 120 days post-prime immunization with clinical candidate COH04S1.

[0061] FIG. 53 shows that IFN-γ and IL-4 responses to S and N antigens measured in clinical candidate COH04S1 sentinels and in a pool of Pfizer/BioNTech vaccine recipients at days 56-60 (top) and 90 (bottom) post-prime immunization. COH04S1: d56/d90, EUA: d60/d90, and D0 response was subtracted.

[0062] FIGS. 54A-54D show antigen expression by SARS-CoV-2 VOC vaccine vectors C163 and C164. CEF cells were infected with the VOC sMVA vectors C163 and C164 or the original COH04S1 sMVA-CoV2 vector (C35) and evaluated by Western Blot using antibodies specific for the S1 and S2 domains of the S protein (αS1 and αS2) or antibodies specific for N (αN). Uninfected CEF cells and CEF cells infected with empty sMVA vector were analyzed for control. Vaccinia B5R protein (αB5R) was detected to verify similar levels of infection between vaccine vectors.

[0063] FIGS. 55A-55C show antigen expression by SARS-CoV-2 VOC vaccine vector C170. CEF cells were infected with the VOC sMVA vector C170 or the original CIG04S1 sMVA vaccine construct (C35) and evaluated by Western Blot using antibodies specific for the S1 domain of the S protein (αS1) or antibodies specific for N (αN). Uninfected CEF cells and CEF cells infected with empty sMVA vector were analyzed as a control. Vaccinia B5R protein (αB5R) was detected to verify similar levels of infection between vaccine vectors.

[0064] FIG. 56 illustrates an overview of pre-clinical vaccine production process.

[0065] FIG. 57 is an extension of FIG. 56 and illustrates the derivation of clinical vaccine candidate COH04S1 from the original C35 sMVA-N/S vaccine vector.

[0066] FIG. 58 shows the sequence of sMVA-N/S (deposited with NCBI under Accession No. MW036243, www.ncbi.nlm.nih.gov/nuccore/MW036243.⅟).

[0067] FIG. 59 shows the sequence of sMVA-S/N (deposited with NCBI under Accession No. MW030460, www.ncbi.nlm.nih.gov/nuccore/MW030460.⅟).

[0068] FIG. 60 shows the DNA sequence/open reading frame (ORF) (5′ to 3′ end) of the Spike (S) antigen sequence based on the genome sequence of the NCBI SARS-CoV-2 reference strain (#NC_045512), isolated Wuhan-Hu-1.

[0069] FIG. 61 shows the encoded protein sequence (N- to C-terminus) of the Spike (S) antigen sequence based on the genome sequence of the NCBI SARS-CoV-2 reference strain (#NC_045512), isolated Wuhan-Hu-1.

[0070] FIG. 62 shows the DNA sequence/open reading frame (ORF) (5′ to 3′ end) of the SARS-CoV-2 S antigen sequence based on the Wuhan-Hu-1 reference strain (#NC_045512) and optimized for stability in vaccinia by silent codon alteration to avoid 4 or more of the same nucleotides in consecutive order.

[0071] FIG. 63 shows the encoded protein sequence (N- to C-terminus) of the SARS-CoV-2 S antigen sequence based on the Wuhan-Hu-1 reference strain (#NC_045512) and optimized for stability in vaccinia by silent codon alteration to avoid 4 or more of the same nucleotides in consecutive order.

[0072] FIG. 64 shows the DNA sequence/open reading frame (ORF) (5′ to 3′ end) of the Nucleocapsid (N) antigen sequence based on the genome sequence of the NCBI SARS-CoV-2 reference strain (#NC_045512), isolate Wuhan-Hu-1.

[0073] FIG. 65 shows the encoded protein sequence (N- to C-terminus) of the Nucleocapsid (N) antigen sequence based on the genome sequence of the NCBI SARS-CoV-2 reference strain (#NC_045512), isolate Wuhan-Hu-1.

[0074] FIG. 66 shows the DNA sequence/open reading frame (ORF) (5′ to 3′ end) of the SARS-CoV-2 N antigen sequence based on the Wuhan-Hu-1 reference strain (#NC_045512) and optimized for stability in vaccinia by silent codon alteration to avoid 4 or more of the same nucleotides in consecutive order.

[0075] FIG. 67 shows the encoded protein sequence (N- to C-terminus) of the SARS-CoV-2 N antigen sequence based on the Wuhan-Hu-1 reference strain (#NC_045512) and optimized for stability in vaccinia by silent codon alteration to avoid 4 or more of the same nucleotides in consecutive order.

[0076] FIG. 68 shows the DNA sequence/open reading frame (ORF) (5′ to 3′ end) of the codon-optimized S antigen sequence disclosed above (based on the Wuhan-Hu-1 reference strain (#NC_045512) and optimized for vaccinia), which is further modified to encode for a prefusion stabilized S antigen with 2P alteration (lysine and valine at amino acid positions 986 and 987 substituted with prolines).

[0077] FIG. 69 shows the encoded protein sequence (N- to C-terminus) of the codon-optimized S antigen sequence disclosed above (based on the Wuhan-Hu-1 reference strain (#NC_045512) and optimized for vaccinia), which is further modified to encode for a prefusion stabilized S antigen with 2P alteration (lysine and valine at amino acid positions 986 and 987 substituted with prolines).

[0078] FIG. 70 shows the DNA sequence/ORF (5′ to 3′ end) of the codon-optimized S antigen sequence disclosed above (based on the Wuhan-Hu-1 reference strain (#NC_045512) and optimized for vaccinia), which is further modified to encode for a prefusion stabilized S antigen with 2P alteration (lysine and valine at amino acid positions 986 and 987 substituted with prolines) and mutated Furin cleavage site (RRAR amino acids at positions 682-685 substituted with GSAS).

[0079] FIG. 71 shows the encoded protein sequence (N- to C-terminus) of the codon-optimized S antigen sequence disclosed above (based on the Wuhan-Hu-1 reference strain (#NC_045512) and optimized for vaccinia), which is further modified to encode for a prefusion stabilized S antigen with 2P alteration (lysine and valine at amino acid positions 986 and 987 substituted with prolines) and mutated Furin cleavage site (RRAR amino acids at positions 682-685 substituted with GSAS).

[0080] FIG. 72 shows the DNA sequence/ORF (5′ to 3′ end) of the codon-optimized S antigen sequence disclosed above (based on the Wuhan-Hu-1 reference strain (#NC_045512) and optimized for vaccinia), which is further modified to encode for a prefusion stabilized S antigen with 2P alteration (lysine and valine at amino acid positions 986 and 987 substituted with prolines), mutated Furin cleavage site (RRAR amino acids at positions 682-685 substituted with GSAS), and 19 amino acid residues deleted at the C-terminus to prevent endoplasmic reticulum retention and to enhance cell surface expression.

[0081] FIG. 73 shows the encoded protein sequence (N- to C-terminus) of the codon-optimized S antigen sequence disclosed above (based on the Wuhan-Hu-1 reference strain (#NC_045512) and optimized for vaccinia), which is further modified to encode for a prefusion stabilized S antigen with 2P alteration (lysine and valine at amino acid positions 986 and 987 substituted with prolines), mutated Furin cleavage site (RRAR amino acids at positions 682-685 substituted with GSAS), and 19 amino acid residues deleted at the C-terminus to prevent endoplasmic reticulum retention and to enhance cell surface expression.

[0082] FIG. 74 shows a SARS-CoV-2 S antigen sequence which is fully codon-optimized for human expression, additionally optimized for stability in vaccinia by silent codon alteration to avoid 4 or more of the same nucleotides in consecutive order, and encodes for an S antigen with mutated Furin cleavage site and stabilizing 2P mutation.

[0083] FIG. 75 shows a SARS-CoV-2 S antigen sequence which is fully codon-optimized for vaccinia virus expression, additionally optimized for stability in vaccinia by silent codon alteration to avoid 4 or more of the same nucleotides in consecutive order, and encodes for an S antigen with mutated Furin cleavage site and stabilizing 2P mutation.

[0084] FIG. 76 shows a SARS-CoV-2 N antigen sequence which is fully codon-optimized for human expression and additionally optimized for stability in vaccinia by silent codon alteration to avoid 4 or more of the same nucleotides in consecutive order.

[0085] FIG. 77 shows a SARS-CoV-2 N antigen sequence which is fully codon-optimized for vaccinia virus expression and additionally optimized for stability in vaccinia by silent codon alteration to avoid 4 or more of the same nucleotides in consecutive order.

[0086] FIG. 78 shows the DNA sequence/ORF (5′ to 3′ end) of the S1 domain encompassing 698 amino acid residues of the N-terminus of the SARS-CoV-2 S antigen based on the Wuhan reference strain (#NC_045512) and optimized for stability in vaccinia.

[0087] FIG. 79 shows the encoded protein sequence (N- to C-terminus) of the S1 domain encompassing 698 amino acid residues of the N-terminus of the SARS-CoV-2 S antigen based on the Wuhan reference strain (#NC_045512) and optimized for stability in vaccinia.

[0088] FIG. 80 shows the DNA sequence/ORF (5′ to 3′ end) of the S1 domain encompassing 680 amino acid residues of the N-terminus of the SARS-CoV-2 S antigen based on the Wuhan reference strain (#NC_045512) and optimized for stability in vaccinia.

[0089] FIG. 81 shows the encoded protein sequence (N- to C-terminus) of the S1 domain encompassing 680 amino acid residues of the N-terminus of the SARS-CoV-2 S antigen based on the Wuhan reference strain (#NC_045512) and optimized for stability in vaccinia.

[0090] FIG. 82 shows the DNA sequence/ORF (5′ to 3′ end) of an RBD encompassing amino acid residues 331-524 of the SARS-CoV-2 S antigen based on the Wuhan reference strain (#NC_045512) and optimized for stability in vaccinia fused to the signal peptide of the S antigen (C-terminal 13 amino acids).

[0091] FIG. 83 shows the encoded protein sequence (N- to C-terminus) of an RBD encompassing amino acid residues 331-524 of the SARS-CoV-2 S antigen based on the Wuhan reference strain (#NC_045512) and optimized for stability in vaccinia fused to the signal peptide of the S antigen (C-terminal 13 amino acids).

[0092] FIG. 84 shows the DNA sequence/ORF (5′ to 3′ end) of an RBD encompassing amino acid residues 319-541 of the SARS-CoV-2 S antigen based on the Wuhan reference strain (#NC_045512) and optimized for stability in vaccinia fused to the signal peptide of the S antigen (C-terminal 13 amino acids).

[0093] FIG. 85 shows the encoded protein sequence (N- to C-terminus) of an RBD encompassing amino acid residues 319-541 of the SARS-CoV-2 S antigen based on the Wuhan reference strain (#NC_045512) and optimized for stability in vaccinia fused to the signal peptide of the S antigen (C-terminal 13 amino acids).

[0094] FIG. 86 shows the DNA sequence/ORF (5′ to 3′ end) of the codon-optimized SARS-CoV-2 S antigen sequence based on the Wuhan-Hu-1 reference strain (#NC_045512) and optimized for vaccinia, which is further modified to encode for an S antigen that includes mutations of the B.1.351 variant lineage identified in South Africa (N501Y, E484K, K417N, L18F, D80A, D215G, Del242-244, R2461, D614G, A701I).

[0095] FIG. 87 shows the encoded protein sequence (N- to C-terminus) of the codon-optimized SARS-CoV-2 S antigen sequence based on the Wuhan-Hu-1 reference strain (#NC_045512) and optimized for vaccinia, which is further modified to encode for an S antigen that includes mutations of the B.1.351 variant lineage identified in South Africa (N501Y, E484K, K417N, L18F, D80A, D215G, Del242-244, R2461, D614G, A701V).

[0096] FIG. 88 shows the DNA sequence/ORF (5′ to 3′ end) of the codon-optimized SARS-CoV-2 S antigen sequence based on the Wuhan-Hu-1 reference strain (#NC_045512) and optimized for vaccinia, which is further modified to encode for an S antigen that includes mutations of the B.1.1.7 variant lineage identified in the UK (N501Y, Del69/70, Del144, A570D, D614G, P681H, T7161, S982A, D1118H).

[0097] FIG. 89 shows the encoded protein sequence (N- to C-terminus) of the codon-optimized SARS-CoV-2 S antigen sequence based on the Wuhan-Hu-1 reference strain (#NC_045512) and optimized for vaccinia, which is further modified to encode for an S antigen that includes mutations of the B.1.1.7 variant lineage identified in the UK (N501Y, Del69/70, Del144, A570D, D614G, P681H, T7161, S982A, D1118H).

[0098] FIG. 90 shows the DNA sequence/ORF (5′ to 3′ end) of the codon-optimized SARS-CoV-2 S antigen sequence based on the Wuhan-Hu-1 reference strain (#NC_045512) and optimized for vaccinia, which is further modified to encode for an S antigen that includes mutations of the B.1.429+B.1.427 variant lineage identified in California (D614G, L452R, S13l, W152C).

[0099] FIG. 91 shows the encoded protein sequence (N- to C-terminus) of the codon-optimized SARS-CoV-2 S antigen sequence based on the Wuhan-Hu-1 reference strain (#NC_045512) and optimized for vaccinia, which is further modified to encode for an S antigen that includes mutations of the B.1.429+B.1.427 variant lineage identified in California (D614G, L452R, S13l, W152C).

[0100] FIG. 92 shows the DNA sequence/ORF (5′ to 3′ end) of the codon-optimized SARS-CoV-2 S antigen sequence based on the Wuhan-Hu-1 reference strain (#NC_045512) and optimized for vaccinia, which is further modified to encode for an S antigen that includes mutations of P.1 variant lineage identified in Brazil (N501Y, E484K, K417T, L18F, T20N, P26S, D138Y, R190S, H655Y, T10271, V1176F).

[0101] FIG. 93 shows the encoded protein sequence (N- to C-terminus) of the codon-optimized SARS-CoV-2 S antigen sequence based on the Wuhan-Hu-1 reference strain (#NC_045512) and optimized for vaccinia, which is further modified to encode for an S antigen that includes mutations of P.1 variant lineage identified in Brazil (N501Y, E484K, K417T, L18F, T20N, P26S, D138Y, R190S, H655Y, T10271, V1176F).

[0102] FIG. 94 shows the sequence encoding the S antigen of the Wuhan-Hu-1 reference strain.

[0103] FIG. 95 shows the sequence encoding the S antigen of the South African variant B.1.351.

[0104] FIG. 96 shows the sequence encoding the S antigen of the UK variant B.1.1.7.

[0105] FIG. 97 shows the DNA sequence/ORF (5′ to 3′ end) of the RBD domain of the Wuhan-Hu-1 reference strain, the RBD domain of the B.1.351 variant, and an RBD domain combining N501Y and L452R mutations of the B.1.1.7 and B.1.429+B.1.427 variants co-expressed by a triple polycistronic expression construct which comprises at the N-terminus a signal peptide of the S antigen (MFVFLVLLPLVSSQCV) and in which the RBD domains are connected through GS linkers such as GSGSGS.

[0106] FIG. 98 shows the encoded protein sequence (N- to C-terminus) of the RBD domain of the Wuhan-Hu-1 reference strain, the RBD domain of the B.1.351 variant, and an RBD domain combining N501Y and L452R mutations of the B.1.1.7 and B.1.429+B.1.427 variants co-expressed by a triple polycistronic expression construct which comprises at the N-terminus a signal peptide of the S antigen (MFVFLVLLPLVSSQCV) and in which the RBD domains are connected through GS linkers such as GSGSGS.

[0107] FIG. 99 shows the DNA sequence/ORF (5′ to 3′ end) of the RBD domain of the Wuhan-Hu-1 reference strain, the RBD domain of the B.1.351 variant, and a RBD domain combining the N501Y and L452R mutations of the B.1.1.7 and B.1.429+B.1.427 variants co-expressed by a triple polycistronic expression construct comprising at the N-terminus a signal peptide of the S antigen (MFVFLVLLPLVSSQCV) and at the C-terminus a T4 Foldon domain (GYIPEAPRDGQAYVRKDGEWVLLSTFL) and in which the RBD domains are connected through GS linkers such as GSGSGS.

[0108] FIG. 100 shows the encoded protein sequence (N- to C-terminus) of the RBD domain of the Wuhan-Hu-1 reference strain, the RBD domain of the B.1.351 variant, and a RBD domain combining the N501Y and L452R mutations of the B.1.1.7 and B.1.429+B.1.427 variants co-expressed by a triple polycistronic expression construct comprising at the N-terminus a signal peptide of the S antigen (MFVFLVLLPLVSSQCV) and at the C-terminus a T4 Foldon domain (GYIPEAPRDGQAYVRKDGEWVLLSTFL) and in which the RBD domains are connected through GS linkers such as GSGSGS.

[0109] FIG. 101 shows the DNA sequence/ORF (5′ to 3′ end) of the RBD domain of the Wuhan-Hu-1 reference strain, the RBD domain of the B.1.351 variant, and an RBD domain combining N501Y and L452R mutations of the B.1.1.7 and B.1.429+B.1.427 variants co-expressed by a polycistronic expression construct in which each RBD domain comprises at the N-terminus a signal peptide of the S antigen (MFVFLVLLPLVSSQCV) and in which the RBD domains are connected through GS linkers such as GSGSGS and P2A and T2A peptides.

[0110] FIG. 102 shows the encoded protein sequence (N- to C-terminus) of the RBD domain of the Wuhan-Hu-1 reference strain, the RBD domain of the B.1.351 variant, and an RBD domain combining N501Y and L452R mutations of the B.1.1.7 and B.1.429+B.1.427 variants co-expressed by a polycistronic expression construct in which each RBD domain comprises at the N-terminus a signal peptide of the S antigen (MFVFLVLLPLVSSQCV) and in which the RBD domains are connected through GS linkers such as GSGSGS and P2A and T2A peptides.

[0111] FIG. 103 shows the DNA sequence/ORF (5′ to 3′ end) of the RBD domain of the Wuhan-Hu-1 reference strain, the RBD domain of the B.1.351 variant, and a RBD domain combining N501Y and L452R mutations of the B.1.1.7 and B.1.429+B.1.427 variants co-expressed by a polycistronic expression construct in which the RBD domains are connected through GS linkers (GSGSGS) and P2A and T2A peptides and in which each RBD domain is fused at the N-terminus to a S signal peptide (MFVFLVLLPLVSSQCV) and at the C-terminus to a T4 Foldon domain (GYIPEAPRDGQAYVRKDGEWVLLSTFL).

[0112] FIG. 104 shows the encoded protein sequence (N- to C-terminus) of the RBD domain of the Wuhan-Hu-1 reference strain, the RBD domain of the B.1.351 variant, and a RBD domain combining N501Y and L452R mutations of the B.1.1.7 and B.1.429+B.1.427 variants co-expressed by a polycistronic expression construct in which the RBD domains are connected through GS linkers (GSGSGS) and P2A and T2A peptides and in which each RBD domain is fused at the N-terminus to a S signal peptide (MFVFLVLLPLVSSQCV) and at the C-terminus to a T4 Foldon domain (GYIPEAPRDGQAYVRKDGEWVLLSTFL).

[0113] FIG. 105 shows the DNA sequence/ORF (5′ to 3′ end) of the RBD domain of the Wuhan-Hu-1 reference strain, the RBD domain of the B.1.351 variant, and an RBD domain combining N501Y and L452R mutations of the B.1.1.7 and B.1.429+B.1.427 variants co-expressed by a polycistronic expression construct comprising at the N-terminus a signal peptide of the S antigen (MFVFLVLLPLVSSQCV) and at the C-terminus TM and CT domains (without the last 19 amino acids) of the S antigen and in which the RBD domains are connected through GS linkers such as GSGSGS.

[0114] FIG. 106 shows the encoded protein sequence (N- to C-terminus) of the RBD domain of the Wuhan-Hu-1 reference strain, the RBD domain of the B.1.351 variant, and an RBD domain combining N501Y and L452R mutations of the B.1.1.7 and B.1.429+B.1.427 variants co-expressed by a polycistronic expression construct comprising at the N-terminus a signal peptide of the S antigen (MFVFLVLLPLVSSQCV) and at the C-terminus TM and CT domains (without the last 19 amino acids) of the S antigen and in which the RBD domains are connected through GS linkers such as GSGSGS.

[0115] FIG. 107 shows the DNA sequence/ORF (5′ to 3′ end) of the RBD domain of the Wuhan-Hu-1 reference strain, the RBD domain of the B.1.351 variant, and an RBD domain combining N501Y and L452R mutations of the B.1.1.7 and B.1.429+B.1.427 variants co-expressed by a polycistronic expression construct in which each of the RBD domains comprises at the N-terminus a signal peptide of the S protein (MFVFLVLLPLVSSQCV) and at the C-terminus TM and CT domains (without the last 19 amino acids) of the S antigen and in which the RBD domains are connected through GS linkers such as GSGSGS and P2A and T2A peptide sequences.

[0116] FIG. 108 shows the encoded protein sequence (N- to C-terminus) of the RBD domain of the Wuhan-Hu-1 reference strain, the RBD domain of the B.1.351 variant, and an RBD domain combining N501Y and L452R mutations of the B.1.1.7 and B.1.429+B.1.427 variants co-expressed by a polycistronic expression construct in which each of the RBD domains comprises at the N-terminus a signal peptide of the S protein (MFVFLVLLPLVSSQCV) and at the C-terminus TM and CT domains (without the last 19 amino acids) of the S antigen and in which the RBD domains are connected through GS linkers such as GSGSGS and P2A and T2A peptide sequences.

[0117] FIG. 109 shows the DNA sequence/ORF (5′ to 3′ end) of a codon-optimized N antigen that includes the N-specific mutations in the B.1.1.7 variant lineage identified in the UK, including an aspartic acid to leucine substitution at amino acid position 3 of the N protein (D3L), a serine to phenylalanine substitution at amino acid position 235 of the N protein (S235F), an arginine to lysine substitution at amino acid position 203 of the N protein (R203K), and a glycine to arginine substitution at amino acid position 204 of the N protein (G204R).

[0118] FIG. 110 shows the encoded protein sequence (N- to C-terminus) of a codon-optimized N antigen that includes the N-specific mutations in the B.1.1.7 variant lineage identified in the UK, including an aspartic acid to leucine substitution at amino acid position 3 of the N protein (D3L), a serine to phenylalanine substitution at amino acid position 235 of the N protein (S235F), an arginine to lysine substitution at amino acid position 203 of the N protein (R203K), and a glycine to arginine substitution at amino acid position 204 of the N protein (G204R).

[0119] FIG. 111 shows the DNA sequence/ORF (5′ to 3′ end) of a codon-optimized N antigen that includes the N-specific mutations in the B.1.351 variant lineage identified in South Africa, including a threonine to isoleucine substitution at amino acid position 205 of the N protein (T205I).

[0120] FIG. 112 shows the encoded protein sequence (N- to C-terminus) of a codon-optimized N antigen that includes the N-specific mutations in the B.1.351 variant lineage identified in South Africa, including a threonine to isoleucine substitution at amino acid position 205 of the N protein (T205I).

[0121] FIG. 113 shows the DNA sequence/ORF (5′ to 3′ end) of a codon-optimized N antigen that includes the N-specific mutations in the P.1 variant lineage identified in Brazil, including a proline to arginine substitution at amino acid position 80 of the N protein (P80R), as well as R203K and G204R.

[0122] FIG. 114 shows the encoded protein sequence (N- to C-terminus) of a codon-optimized N antigen that includes the N-specific mutations in the P.1 variant lineage identified in Brazil, including a proline to arginine substitution at amino acid position 80 of the N protein (P80R), as well as R203K and G204R.

[0123] FIG. 115 shows the DNA sequence/ORF (5′ to 3′ end) of the codon-optimized SARS-CoV-2 S antigen sequence based on the Wuhan-Hu-1 reference strain (#NC_045512) and optimized for vaccinia, which is further modified to encode for an S antigen that includes mutations of the B.1.617 variant lineage identified in India, including L452R and E484Q mutations in the RBD domain, D614G, a glycine to aspartic acid substitution at amino acid position 142 of the S protein (G142D), a glutamic acid to lysine substitution at amino acid position 154 of the S protein (E154K), a proline to lysine substitution at amino acid position 681 of the S protein (P681R), a glutamine to histidine substitution at amino acid position 1071 of the S protein (Q1071H), and a histidine aspartic acid substitution at amino acid position 1101 of the S protein (H1101D).

[0124] FIG. 116 shows the encoded protein sequence (N- to C-terminus) of the codon-optimized SARS-CoV-2 S antigen sequence based on the Wuhan-Hu-1 reference strain (#NC_045512) and optimized for vaccinia, which is further modified to encode for an S antigen that includes mutations of the B.1.617 variant lineage identified in India, including L452R and E484Q mutations in the RBD domain, D614G, a glycine to aspartic acid substitution at amino acid position 142 of the S protein (G142D), a glutamic acid to lysine substitution at amino acid position 154 of the S protein (E154K), a proline to lysine substitution at amino acid position 681 of the S protein (P681R), a glutamine to histidine substitution at amino acid position 1071 of the S protein (Q1071H), and a histidine aspartic acid substitution at amino acid position 1101 of the S protein (H1101D).

[0125] FIG. 117 shows the DNA sequence/ORF (5′ to 3′ end) of the codon-optimized SARS-CoV-2 N antigen sequence encoding for an N antigen that includes the N-specific mutations in the B.1.617 variant lineage identified in India, including an arginine to methionine substitution at amino acid position 203 of the N protein (R203M) and an aspartic acid to tyrosine substitution at amino acid position 377 of the N protein (D377Y).

[0126] FIG. 118 shows the encoded protein sequence (N- to C-terminus) of the codon-optimized SARS-CoV-2 N antigen sequence encoding for an N antigen that includes the N-specific mutations in the B.1.617 variant lineage identified in India, including an arginine to methionine substitution at amino acid position 203 of the N protein (R203M) and an aspartic acid to tyrosine substitution at amino acid position 377 of the N protein (D377Y).

### DETAILED DESCRIPTION

[0127] Disclosed herein are methods of producing recombinant sMVA (rsMVA) expressing one or more heterologous gene sequences encoding coronavirus antigens. A fully synthetic version of MVA (sMVA) from circularized or linear synthetic DNA fragments is produced and disclosed in PCT application No. PCT/US21/16247, the content of which is incorporated by reference in its entirety. The sMVA or the rsMVA can be used as a vaccine for preventing and treating various conditions such as coronavirus infections and associated diseases.

[0128] Since the outbreak of the novel severe acute respiratory syndrome coronavirus-2 (SARS-CoV-2) in December 2019, the virus has spread to more than 200 countries worldwide, causing a pandemic of global magnitude with over 3 million deaths. Many vaccine candidates are currently under rapid development to control this global pandemic, some of which have entered with unprecedented pace into clinical trials. Most of these approaches employ antigenic forms of the Spike (S) protein as it is considered the primary target of protective immunity^{16,20-22}. The S protein mediates SARS-CoV-2 entry into a host cell through binding to angiotensin-converting enzyme 2 (ACE) and is the major target of neutralizing antibodies (NAb)²³⁻²⁵. Studies in rhesus macaques show that vaccine strategies based on the S antigen can prevent SARS-CoV-2 infection and disease in this relevant animal model¹⁸, indicating that the S antigen may be sufficient as vaccine immunogen to elicit protective immunity. However, a recent study showed that even patients without measurable NAb can recover from SARS-CoV-2 infection, suggesting that protection against SARS-CoV-2 infection is mediated by both humoral and cellular immunity to multiple immunodominant antigens, including S and Nucleocapsid (N) antigens^{20,26}. In this disclosure, the terms of “S protein” and “S antigen” are used interchangeably, and the terms of “N protein” and “N antigen” are used interchangeably.

[0129] Disclosed herein is a novel vaccine platform based on a uniquely designed three-plasmid system to efficiently generate recombinant MVA vectors from chemically synthesized DNA. In response to the ongoing global SARS-CoV-2 pandemic, this novel vaccine platform can be used to rapidly produce sMVA vectors co-expressing SARS-CoV-2 S and N antigens or any additional antigens. These antigens used for vaccine production can be based on the Wuhan reference strain or include one or more mutations based on emerging VOCs. As demonstrated in the working examples, these sMVA vectors induced potent SARS-CoV-2 antigen-specific humoral and cellular immunity in mice, including potent NAb. These results highlight the feasibility to efficiently produce recombinant MVA vectors from chemically synthesized DNA and to rapidly develop a synthetic poxvirus-based vaccine candidate to prevent SARS-CoV-2 infection.

[0130] Disclosed herein is a synthetic form of MVA and a method of producing the same using chemically synthesized DNA, which differs from the recently described approach to produce a synthetic horsepox virus vaccine vector⁴². In certain embodiments, a single DNA fragment is derived from viral DNA or chemically synthesized and comprises the entire genome sequence of MVA. This single DNA fragment can be used to transfect a host cell such that the MVA is reconstituted. In other embodiments, two or more naturally derived or chemically synthesized DNA fragments, or a combination thereof, are used to co-transfect a host cell, wherein each DNA fragment comprises a partial sequence of the MVA genomic DNA with overlapping sequences at the ends of two adjacent DNA fragments, such that when the two or more DNA fragments are co-transfected into the host cell, they assemble with each other by homologous recombination to form MVA comprising a full-length sequence of the desired MVA genome. In certain embodiments, the overlapping sequence is between about 100 bp and about 5000 bp in length.

[0131] In certain embodiments, one or more naturally derived or chemically synthesized DNA fragment(s) comprising the MVA genome or subgenomic DNA may be further modified to form artificial hybrid fragments composed of natural and synthetic MVA genomic DNA sequences.

[0132] In certain embodiments, the host cell is infected with a helper virus such as FPV before, during, or after the transfection of one or more DNA fragments comprising the sequence of the MVA genome or subgenomic DNA.

[0133] As demonstrated herein, the disclosed technique of generating sMVA involves the use of three large circular DNA fragments (about 60 kbp) with intrinsic HL and CR sequences (FIG. 1), the approach by Noyce et al. to produce a synthetic horsepox vaccine involves the use of multiple smaller linear DNA fragments (about 10-30 kbp) and the addition of terminal HL sequences⁴². Because the three sMVA fragments are used in a circular form for the sMVA reconstitution process they are easily maintained in E. coli as BACs and transferred to BHK-21 cells for sMVA virus reconstitution without the need for additional purification steps or modifications. This feature greatly facilitates the insertion of heterologous antigen sequences into the sMVA DNA by highly efficient bacterial recombination techniques and to produce recombinant sMVA vaccine vectors. Additionally, the three plasmid system provides the flexibility for rapid production of recombinant MVA harboring multiple antigens inserted into different MVA insertion sites, which can be particularly laborious when generating recombinant MVA by the conventional transfection/infection procedure^{3,43}. The three sMVA fragments efficiently recombine with one another and produce a synthetic form of MVA that is virtually identical to wtMVA in genome content, replication properties, host cell range, and immunogenicity.

[0134] More specifically, as illustrated in FIG. 1A, the MVA genome comprises an internal unique region (UR) flanked by ~9.6 kbp long inverted terminal repeat (ITR) regions. The MVA genome sequence published by Antoine and colleagues (Accession# U94848), herein referred to as MVA strain Antoine, differs in five base pairs in the internal UR from the MVA genome of the licensed and commercially available National Institute of Health clone 1 from 1974 (MVA NIH clone 1), which is identical in sequence to the published genome of MVA strain Acambis (Accession# AY603355). sMVA fragment 1 (F1) encompasses the left ITR and ~50 kbp of the left end of internal UR of the MVA genome; sMVA fragment 2 (F2) contains ~60 kbp of the middle part of the internal UR of the MVA genome; and sMVA fragment 3 (F3) encompasses ~50 kbp of the right end of the internal UR and the right ITR of the MVA genome (FIG. 1B). sMVAF1 and F2 as well as sMVA F2 and F3 are designed to share ~3 kbp overlapping sequences to allow the reconstitution of the complete MVA genome by homologous recombination (FIG. 1B). A duplex copy of the 165-nucleotide long MVA terminal hairpin loop (HL) flanked by MVA concatemeric resolution sequences is added to both ends of each of the three fragments to promote MVA genome resolution and packaging (FIG. 1C). The three sMVA fragments are cloned and maintained in E. coli (DH10B, EPl300, GS1783) by a yeast-bacterial shuttle vector, termed pCCI-Brick (GeneScript), which contains a bacterial mini-F replicon element that can be used as a BAC vector to stably propagate the three fragments at low copy number in bacteria (FIG. 1). Next generation sequencing analysis confirmed the integrity of the MVA genomic sequences of the fragments, with the notable exception of an unknown single point mutation within sMVA fragment F1 that is located in a non-coding determining region at 3bp downstream of 021L.

[0135] When baby hamster kidney (BHK) are co-transfected with the three plasmids containing the sMVA fragments F1-F3 (FIG. 1) and subsequently infected with Fowlpox virus (FPV) as a helper virus, the three sMVA fragments recombine with each other through the shared homologous sequences and the reconstitution of synthetic MVA (sMVA) is initiated (FIG. 3D). FPV is used as a helper virus to initiate the transcription of the sMVA DNA and, consequently, the sMVA reconstitution process. In the absence of a helper virus, the “naked” sMVA DNA may not promote virus reconstitution as poxvirus DNA is considered as non-infectious. Importantly, while BHK-21 cells are highly permissive for MVA infection and replication, they are not permissive for productive FPV infection, leading to immediate removal of the FPV helper virus following sMVA virus reconstitution in BHK-21 cells. In addition, FPV used as a helper virus in mammalian cells promotes highly efficient and selective packaging of vaccinia virus genomes.

[0136] Also disclosed is a multi-antigenic sMVA-CoV2 vaccine using the highly versatile synthetic vaccine platform based on sMVA. MVA is a highly attenuated poxvirus vector, widely used to develop vaccines for infectious diseases and cancer. There is a long history of safety, efficacy and long-term protection in humans. New Spike variants of SARS-CoV-2 can be quickly cloned into one of three plasmids that when recombined form an sMVA vaccine.

[0137] As disclosed herein, the multiple antigens, subunits thereof, or fragments thereof can be co-expressed using the same promoter or different promoters, optionally linked by 2A peptides. The sequences encoding the multiple antigens, subunits thereof, or fragments thereof can be inserted at the same insertion site or different insertion sites of sMVA. For example, the vaccine composition comprising two or more antigens encoding for at least two S or N proteins, S1 or S2 domains, or RBDs are co-expressed using the same promotor or separate promoters or the same insertion site or separate insertion sites. In another example, the vaccine composition comprising two or more antigens encoding for at least two S or N proteins, S1 or S2 domains, or RBD are linked by 2A peptides and co-expressed through polycistonic constructs by the same promoter.

[0138] In certain embodiments, the vaccine composition disclosed herein comprises a mixture of two or more sMVA vectors which encode two or more different SARS-CoV-2 antigen sequences selected from the Wuhan-Hu-1 reference strain and different VOC. For example, one sMVA vector in the mixture comprises sequences encoding SARS-CoV-2 antigens from the Wuhan-Hu-1 reference strain, and another sMVA vector in the mixture comprises sequences encoding SARS-CoV-2 antigens from a VOC.

[0139] MVA is a highly attenuated strain of vaccinia. Mammalian cells are permissive to MVA, including human cells, propagation restricted to avian cells. MVA also has multi-antigenic capacity (30 Kb) and can be easily modified to assemble new vaccines against viral variants, e.g. UK or RSA variants. MVA is an attenuated viral vaccine, which has advantage in immunogenicity, compared to DNA/RNA/protein vaccines. MVA is capable of long-lived high titer humoral and high frequency cellular immune responses, maintains immunogenicity as lyophilizate to eliminate cold chain resulting in cheaper storage and transport. Safety and efficacy of MVA-based vaccines were established in human trials since the 1970s. Over 150,000 people were successfully immunized in historical studies, including children and the elderly. Multiple studies sponsored by NIAID showed safety after immunization in HIV-infected adults. MVA is suitable for providing lifelong immunity against smallpox based on FDA approval as Jynneos™ (Bavarian-Nordic). Multiple MVA-based vaccines have been developed and successfully investigated at COH. Healthy volunteers and transplant patients develop strong immunity even after a single dose.

[0140] In contrast to most other currently employed SARS-CoV-2 vaccine approaches that solely rely on the S antigen, the disclosed SARS-CoV-2 vaccine approach using sMVA employs immune stimulation by S and N antigens, both are implicated in protective immunity^{20,26}. The observation that the sMVA-CoV2 vectors co-expressing S and N antigens can stimulate potent NAb against SARS-CoV-2 pseudovirus and infectious authentic SARS-CoV2 virions suggests that they can elicit antibodies that are considered effective in preventing SARS-CoV-2 infection and COVID-19 disease^{16,18,20,21}. The working examples demonstrate that the vaccine vectors stimulated a Th1-biased antibody and cellular immune response, which is considered the preferred antiviral adaptive immune response to avoid vaccine associated enhanced respiratory disease^{44,45}. Moreover, no evidence is found for Fc-mediated ADE promoted by the vaccine-induced immune sera, suggesting that antibody responses induced by the vaccine vectors bear minimal risk for ADE-mediated immunopathology, a general concern in SARS-CoV-2 vaccine development^{44,45}. Other immune responses besides NAb targeting the S antigen may contribute to the protection against SARS-CoV-2 infection, which is highlighted by the finding that even patients without measurable NAb can recover from SARS-CoV-2 infection²⁰. While antibodies could be particular important to prevent initial SARS-CoV-2 acquisition, T cell responses may impose an additional countermeasure to control sporadic virus spread at local sites of viral infection, thereby limiting virus transmission. The disclosed dual recombinant vaccine approach based on sMVA to induce robust humoral and cellular immune responses to S and N antigens may provide protection against SARS-CoV-2 infection beyond other vaccine approaches using solely the S antigen.

[0141] sMVA recombinants are produced by inserting the sequences encoding one or more antigens or subunits thereof into one or more MVA fragments. In certain embodiments, the DNA sequences of the antigens, subunits, or fragments thereof are codon optimized for expression in the host cell. In certain embodiments, the one or more antigens include human coronavirus antigens such as the S protein, N protein, M protein, E protein, papain-like protease, ORF1A, 3CL protease, ORF1B, endoribonuclease, matrix, helicase, or immunogenic fragments thereof. In certain embodiments, the one or more antigens include a subunit of S protein such as S1 and S2 domains, or the receptor-binding domain (RBD) of the S antigen. In certain embodiments, the one or more antigens include a prefusion form of the S antigen and a mutated S antigen. For example, the SARS-CoV-2 S antigen can be further stabilized by including a mutated Furin cleavage site such that amino acid residues 682-685 RRAR are mutated to GSAS. In another example, lysine 986 and valine 987 of the S antigen are substituted with prolines. In certain embodiments, the S antigen and the N antigen are fully mature or fully glycosylated.

[0142] In certain embodiments, the sequence of sMVA-N/S (deposited with NCBI under Accession No. MW036243, www.ncbi.nlm.nih.gov/nuccore/MW036243.⅟) is shown in FIG. 58.

[0143] In certain embodiments, the sequence of sMVA-S/N (deposited with NCBI under Accession No. MW030460, www.ncbi.nlm.nih.gov/nuccore/MW030460.1/) is shown in FIG. 59.

[0144] As disclosed herein, sequences of various SARS-CoV-2 antigens can be inserted in the sMVA vector to obtain the vaccine composition. The sequences of some antigens used herein are disclosed as follows. In one embodiment, the Spike (S) antigen sequence is based on the genome sequence of the NCBI SARS-CoV-2 reference strain (#NC_045512), isolated Wuhan-Hu-1, which encodes a S protein comprising 1273 amino acids. The DNA sequence/open reading frame (ORF) (5′ to 3′ end) is shown in FIG. 60, and the encoded protein sequence (N- to C-terminus) is shown in FIG. 61.

[0145] In another example, the SARS-CoV-2 S antigen sequence is based on the Wuhan-Hu-1 reference strain (#NC_045512) and optimized for stability in vaccinia by silent codon alteration to avoid 4 or more of the same nucleotides in consecutive order. The DNA/sequence/ORF (5′ to 3′ end) used in COH04SL1 (a.k.a., construct C15 and illustrated as sMVA-S in FIG. 5), COH04SL3 (a.k.a., construct C35 and illustrated as sMVA-N/S in FIG. 5), and COH04SL4 (a.k.a., construct C46 and illustrated as sMVA-S/N in FIG. 5), as well as in the clinical construct COH04S1 (FIG. 17, COH04S1 was derived from the C35 sMVA-N/S vaccine construct (FIG. 5) as illustrated in FIG. 57), is shown in FIG. 62, and the encoded protein sequence (N- to C-terminus) is shown in FIG. 63.

[0146] In one embodiment, the Nucleocapsid (N) antigen sequence is based on the genome sequence of the NCBI SARS-CoV-2 reference strain (#NC_045512), isolate Wuhan-Hu-1, which encodes a N protein composed of 419 amino acids. The DNA sequence/ORF (5′ to 3′ end) is shown in FIG. 64, and the encoded protein sequence (N- to C-terminus) is shown in FIG. 65.

[0147] In another example, the SARS-CoV-2 N antigen sequence is based on the Wuhan-Hu-1 reference strain (#NC_045512) and optimized for stability in vaccinia by silent codon alteration to avoid 4 or more of the same nucleotides in consecutive order. The DNA sequence/ORF (5′ to 3′ end) used in COH04SL2 (a.k.a., construct C13 and illustrated as sMVA-N in FIG. 5), COH04SL3 (a.k.a., construct C35 and illustrated as sMVA-N/S in FIG. 5), and COH04SL4 (a.k.a., construct C46 and illustrated as sMVA-S/N in FIG. 5), as well as in the clinical construct COH04S1 (FIG. 17, COH04S1 was derived from the C35 sMVA-N/S vaccine construct (FIG. 5) as illustrated in FIG. 57), is shown in FIG. 66, and the encoded protein sequence (N- to C-terminus) is shown in FIG. 67.

[0148] In another embodiment the SARS-CoV-2 S antigen sequence is modified to encode for a prefusion stabilized S antigen with 2P alteration (lysine and valine at amino acid positions 986 and 987 substituted with prolines). For example, the codon-optimized S antigen sequence disclosed above (based on the Wuhan-Hu-1 reference strain (#NC_045512) and optimized for vaccinia) is further modified to encode for such an S antigen. The DNA sequence/ORF (5′ to 3′ end) is shown in FIG. 68, and the encoded protein sequence (N- to C-terminus) is shown in FIG. 69.

[0149] In another embodiment, the SARS-CoV-2 S antigen sequence is modified to encode for a prefusion stabilized S antigen with 2P alteration (lysine and valine at amino acid positions 986 and 987 substituted with prolines) and mutated Furin cleavage site (RRAR amino acids at positions 682-685 substituted with GSAS). For example, the codon-optimized S antigen sequence disclosed above (based on the Wuhan-Hu-1 reference strain (#NC_045512) and optimized for vaccinia) is further modified to encode for such an S antigen. The DNA sequence/ORF (5′ to 3′ end) is shown in FIG. 70, and the encoded protein sequence (N- to C-terminus) is shown in FIG. 71.

[0150] In another embodiment the SARS-CoV-2 S antigen sequence is modified to encode for a prefusion stabilized S antigen with 2P alteration (lysine and valine at amino acid positions 986 and 987 substituted with prolines), mutated Furin cleavage site (RRAR amino acids at positions 682-685 substituted with GSAS), and 19 amino acid residues at the C-terminus (KFDEDDSEPVLKGVKLHYT) deleted to prevent endoplasmic reticulum retention and to enhance cell surface expression. For example, the codon-optimized S antigen sequence disclosed above (based on the Wuhan-Hu-1 reference strain (#NC_045512) and optimized for vaccinia) is further modified to encode for such an S antigen. The DNA sequence/ORF (5′ to 3′ end) is shown in FIG. 72, and the encoded protein sequence (N- to C-terminus) is shown in FIG. 73.

[0151] In another example the SARS-CoV-2 S antigen sequence is fully codon-optimized for human expression, additionally optimized for stability in vaccinia by silent codon alteration to avoid 4 or more of the same nucleotides in consecutive order, and encodes for an S antigen with mutated Furin cleavage site and stabilizing 2P mutation, as shown in FIG. 74.

[0152] In another example the SARS-CoV-2 S antigen sequence is fully codon-optimized for Vaccinia virus expression, additionally optimized for stability in vaccinia by silent codon alteration to avoid 4 or more of the same nucleotides in consecutive order, and encodes for an S antigen with mutated Furin cleavage site and stabilizing 2P mutation, as shown in FIG. 75.

[0153] In one example the SARS-CoV-2 N antigen sequence is fully codon-optimized for human expression and additionally optimized for stability in vaccinia by silent codon alteration to avoid 4 or more of the same nucleotides in consecutive order, as shown in FIG. 76.

[0154] In another example the SARS-CoV-2 N antigen sequence is fully codon-optimized for Vaccinia virus expression and additionally optimized for stability in vaccinia by silent codon alteration to avoid 4 or more of the same nucleotides in consecutive order, as shown in FIG. 77.

[0155] In another embodiment, the SARS-CoV-2 S antigen sequence encodes only for the S1 domain that encompasses 698, 685, or 680 amino acid residues or even shorter amino acid sequences of the N-terminus of the S protein. For example, the S antigen sequence based on the Wuhan reference strain (#NC_045512) and optimized for stability in vaccinia as disclosed above encodes for an S1 domain encompassing 698 amino acid residues of the N-terminus of the SARS-CoV-2 S antigen. The DNA sequence/ORF (5′ to 3′ end) is shown in FIG. 78, and the encoded protein sequence (N- to C-terminus) is shown in FIG. 79.

[0156] In another example the SARS-CoV-2 S antigen sequence based on the Wuhan reference strain (#NC_045512) and optimized for stability in vaccinia as disclosed above encodes for an S1 domain encompassing 680 amino acid residues of the SARS-CoV-2 S antigen. The DNA sequence/ORF (5′ to 3′ end) is shown in FIG. 80, and the encoded protein sequence (N- to C-terminus) is shown in FIG. 81.

[0157] In another embodiment, the SARS-CoV-2 S antigen sequence encodes only for the receptor binding domain (RBD) that encompasses amino acid residues 331 to 524 or 319 to 541 of the S antigen, or a longer or shorter fragment thereof comprising the RBD domain. For example, the S antigen sequence based on the Wuhan reference strain (#NC_045512) and optimized for stability in vaccinia as disclosed above encodes for an RBD encompassing amino acid residues 331-524 of the SARS-CoV-2 S antigen fused to the signal peptide of the S antigen (C-terminal 13 amino acids comprising MFVFLVLLPLVSS). The DNA sequence/ORF (5′ to 3′ end) is shown in FIG. 82, and the encoded protein sequence (N- to C-terminus) is shown in FIG. 83.

[0158] In another embodiment, the SARS-CoV-2 S antigen sequence is based on the Wuhan reference strain (#NC_045512) and optimized for stability in vaccinia as disclosed above encodes for an RBD encompassing amino acid residues 319-541 of the SARS-CoV-2 S antigen fused to the signal peptide of the S antigen (C-terminal 13 amino acids comprising MFVFLVLLPLVSS). The DNA sequence/ORF (5′ to 3′ end) is shown in FIG. 84, and the encoded protein sequence (N- to C-terminus) is shown in FIG. 85.

[0159] In another embodiment the SARS-CoV-2 S antigen sequence encodes for an S antigen that contains one or more mutations or alterations at any amino acid position of the S antigen. These mutations or alterations may include amino acid substitutions, insertion, or deletions. The mutations may be involved in immune evasion that renders SARS-CoV-2 resistant to certain humoral and cellular immune responses, including neutralizing antibodies (NAb). The mutations may include one or more alterations in the RBD domain (amino acid residues 319-541) that mediates binding to and entry into host cells and that is the primary target of NAb. For example, the RBD mutations may include an asparagine to tyrosine substitution at amino acid position 501 of the S antigen (N501Y); a glutamic acid to lysine substitution at amino acid position 484 of the S antigen (E484K); a glutamic acid to glutamine substitution at amino acid position 484 of the S antigen (E484Q); a lysine to asparagine substitution at amino acid position 417 of the S antigen (K417N); a lysine to threonine substitution at amino acid position 417 of the S antigen (K417T); a leucine to arginine substitution at amino acid position 452 of the S antigen (L452R); a serine to asparagine substitution at amino acid position 477 of the S antigen (S477N); an asparagine to lysine substitution at amino acid position 439 of the S antigen (N439K); a serine to proline substitution at amino acid position 494 of the S antigen (S494P); an alanine to serine substitution at amino acid position 520 of the S antigen (S520S); a tyrosine to phenylalanine substitution at amino acid position 453 of the S antigen (Y453F).

[0160] In another embodiment the SARS-CoV-2 S antigen sequence encodes for an S antigen that contains or includes a dominant mutation occurring in SARS-CoV-2 and many of its emerging variants, which is the D614G mutation (aspartic acid to glycine substitution at amino acid position 614 of the S antigen).

[0161] In another embodiment the SARS-CoV-2 antigen sequence encodes for an S antigen that includes all mutations, a subset of the mutations, or a combination of the mutations occurring in the emerging SARS-CoV-2 variants that are of particular concern (variants of concern, or VOC), such as the B.1.351 variant lineage first identified in South Africa, the B.1.1.7 variant lineage first identified in the United Kingdom (UK), the P.1 variant lineage first identified in Brazil, the B.1.429+B.1.427 variant lineage identified in California, or the B.1.617 variant lineage first identified in India. Modified antigen sequences with mutations based on other SARS-CoV-2 variant lineages described by the PANGO tool (cov-lineages.org) or under GISAID (gisaid.org) may also be used. For example, the SARS-CoV-2 S antigen sequence may encode for an S antigen that contains mutations of the B.1.351 variant lineage identified in South Africa variant, including N501Y, E484K, and K417N substitutions in the RBD domain, the D614G mutation, a leucine to phenylalanine substitution at amino acid position 18 of the S antigen (L18F), an aspartic acid to alanine substitution at amino acid position 80 of the S antigen (D80A), an aspartic acid to glycine substitution at amino acid position 215 of the S antigen (D215G), a deletion of three amino acids at position 242-244 (leucine, alanine, leucine) of the S antigen (Del242-244), an arginine to isoleucine substitution at amino acid position 246 of the S antigen (R2461), and an alanine to valine substitution at amino acid position 701 of the S antigen (A701V).

[0162] In another embodiment, the SARS-CoV-2 S antigen sequence encodes for an S antigen that includes mutations of the B.1.1.7 variant lineage identified in the UK, including N501Y in the RBD, D614G, a deletion of two amino acids at positions 69 and 70 (histidine, valine) of the S antigen (Del69/70), a deletion of the tyrosine residue at position 144 of the S antigen (Del144), an alanine to aspartic acid substitution at amino acid position 570 of the S antigen (A570D), a proline to histidine substitution at amino acid position 681 of the S antigen (P681H), a threonine to isoleucine substitution at amino acid position 716 of the S antigen (T7161), a serine to alanine substitution at amino acid position 982 of the S antigen (S982A), and an aspartic acid to histidine substitution at amino acid position 1118 of the S antigen (D1118H). The encoded S antigen based on the UK variant may additionally include E484K and K417N or K417T or other mutations in the RBD domain as disclosed above.

[0163] In another embodiment the SARS-CoV-2 S antigen sequence encodes for an S antigen that includes the mutations of the P.1 variant lineage identified in Brazil, including D614G, N501Y, E484K, K417T, L18F, a threonine to asparagine substitution at amino acid position 20 of the S antigen (T20N), a proline to serine substitution at amino acid position 26 of the S antigen (P26S), an aspartic acid to tyrosine substitution at amino acid position 138 of the S antigen (D138Y), an arginine to serine substitution at amino acid position 190 of the S antigen (R190S), a histidine to tyrosine substitution at amino acid position 655 of the S antigen (H655Y), a threonine to isoleucine substitution at amino acid position 1027 of the S antigen (T10271), and a valine to phenylalanine substitution at amino acid position 1176 of the S antigen (V1176F). The encoded S antigen may additionally include other mutations in the RBD domain as disclosed above, such as L452R or Y453F.

[0164] In another embodiment, the SARS-CoV-2 S antigen sequence encodes for an S antigen that includes the mutations of B.1.429+B.1.427 variant lineage identified in California, including D614G, L452R in the RBD, a serine to isoleucine substitution at amino acid position 13 of the S antigen (S13l), and a tryptophan to cysteine mutation at amino acid position 152 of the S antigen (W152C). The encoded S antigen based on the Southern California variant may additionally include N501Y, E484K, E484Q, or other RBD mutations.

[0165] In another embodiment, the SARS-CoV-2 antigen sequence encodes for an S antigen that contains different combinations of the mutations that occur in the VOC. For example, the S antigen sequence may encode for an S antigen that combines the mutations or only a subset of the mutations that occur in the B.1.429+B.1.427 and B.1.1.7 variant lineages, the B.1.429+B.1.427 and B.1.351 variant lineages, the B.1.429+B.1.427 and P.1 variant lineages, the B.1.1.7 and B.1.351 lineages, the B.1.1.7 and P.1 lineages, the B.1.351 and P.1 lineages, or other combinations of these lineages. These combinations of mutations may additionally include any of the RBD mutations as disclosed above such as N501Y, E484K, K417N, K417T, L452R, S477N, N439K, S520S, and Y453F.

[0166] In another embodiment, the codon-optimized SARS-CoV-2 S antigen sequence disclosed above (based on the Wuhan-Hu-1 reference strain (#NC_045512) and optimized for vaccinia) is further modified to encode for an S antigen that includes mutations of the B.1.351 variant lineage identified in South Africa (N501Y, E484K, K417N, L18F, D80A, D215G, Del242-244, R2461, D614G, A701V). The DNA sequence/ORF (5′ to 3′ end) is shown in FIG. 86, and the encoded protein sequence (N- to C-terminus) is shown in FIG. 87.

[0167] In another example the codon-optimized SARS-CoV-2 S antigen sequence disclosed above (based on the Wuhan-Hu-1 reference strain (#NC_045512) and optimized for vaccinia) is further modified to encode for an S antigen that includes mutations of the B.1.1.7 variant lineage identified in the UK (N501Y, Del69/70, Del144, A570D, D614G, P681H, T7161, S982A, D1118H). The DNA sequence/ORF (5′ to 3′ end) is shown in FIG. 88, and the encoded protein sequence (N- to C-terminus) is shown in FIG. 89.

[0168] In another example the codon-optimized SARS-CoV-2 S antigen sequence disclosed above (based on the Wuhan-Hu-1 reference strain (#NC_045512) and optimized for vaccinia) is further modified to encode for an S antigen that includes mutations of the B.1.429+B.1.427 variant lineage identified in California (D614G, L452R, S131, W152C). The DNA sequence/ORF (5′ to 3′ end) is shown in FIG. 90, and the encoded protein sequence (N- to C-terminus) is shown in FIG. 91.

[0169] In another example the codon-optimized SARS-CoV-2 S antigen sequence disclosed above (based on the Wuhan-Hu-1 reference strain (#NC_045512) and optimized for vaccinia) is further modified to encode for an S antigen that includes mutations of P.1 variant lineage identified in Brazil (N501Y, E484K, K417T, L18F, T20N, P26S, D138Y, R190S, H655Y, T10271, V1176F). The DNA sequence/ORF (5′ to 3′ end) is shown in FIG. 92, and the encoded protein sequence (N- to C-terminus) is shown in FIG. 93.

[0170] In another embodiment the SARS-CoV-2 S antigen sequence is further modified to encode for an S antigen based on the B.1.429+B.1.427, B.1.1.7, B.1.351, or P.1 variant lineages that includes additionally 2P stabilizing mutations (lysine 986 and valine 987 substituted with prolines (K986P and V987P), a mutated Furin cleavage site (682-685 RRAR to GSAS), and/or C-terminal 19 amino acid residues (KFDEDDSEPVLKGVKLHYT) deleted.

[0171] In another embodiment different SARS-CoV-2 antigen sequences with different codon usage are utilized to encode for different S antigens based on the original Wuhan-Hu-1 reference strain and the B.1.429+B.1.427, B.1.1.7, B.1.351, or P.1 variant lineages. These antigen sequences can be inserted together into one sMVA vector or into separate sMVA vectors using different insertion sites (e.g. Del2, Del3, IGR69/70). For example, the following three antigen sequences maybe used to co-express the S antigens of the Wuhan-Hu-1 reference strain, the South African variant B.1.351, and the UK variant B.1.1.7.

[0172] The sequence encoding the S antigen of the Wuhan-Hu-1 reference strain is shown in FIG. 94, the sequence encoding the S antigen of the South African variant B.1.351 is shown in FIG. 95, and the sequence encoding the S antigen of the UK variant B.1.1.7 is shown in FIG. 96.

[0173] In another embodiment multiple different SARS-CoV-2 RBD domains (amino acid residues 319-541) based on the original Wuhan-Hu-1 reference strain, or the B.1.429+B.1.427, B.1.1.7, B.1.351, P.1, or B.1.617 variants, or other emerging SARS-CoV-2 variants can be co-expressed either from one vector or from separate vectors though the utilization of different codon usage. These RBD domains can be co-expressed each by its one Vaccinia promoter (e.g., mH5) or co-expressed through polycistronic expression constructs in which the individual RBD domains are connected through different linkers sequences (e.g., GS linkers) or 2A peptides of picornaviruses mediating ribosomal skipping. In addition, one or more of these domains can be fused at the N-terminus to the SARS-CoV-2 signal sequence (first 13 or 16 N-terminal amino acids of the S protein), at the N- or C-terminus to the T4 fibritin Foldon domain (GYIPEAPRDGQAYVRKDGEWVLLSTFL) that mediates trimerization, and/or at the C-terminus fused to the transmembrane domain (TM) and cytoplasmic domain (CT) of the SARS-CoV-2 S protein, wherein the last 19 amino acids of the CT domain may be deleted to avoid ER retention and enhance cell surface expression.

[0174] For example, the RBD domain of the Wuhan-Hu-1 reference strain, the RBD domain of the B.1.351 variant, and an RBD domain combining N501Y and L452R mutations of the B.1.1.7 and B.1.429+B.1.427 variants can be co-expressed through a triple polycistronic expression construct which comprises at the N-terminus a signal peptide of the S antigen (MFVFLVLLPLVSSQCV) and in which the RBD domains are connected through GS linkers such as GSGSGS. The DNA sequence/ORF (5′ to 3′ end) is shown in FIG. 97, and the encoded protein sequence (N- to C-terminus) is shown in FIG. 98.

[0175] In another example, the RBD domain of the Wuhan-Hu-1 reference strain, the RBD domain of the B.1.351 variant, and a RBD domain combining the N501Y and L452R mutations of the B.1.1.7 and B.1.429+B.1.427 variants can be co-expressed through a triple polycistronic expression construct comprising at the N-terminus a signal peptide of the S antigen (MFVFLVLLPLVSSQCV) and at the C-terminus a T4 Foldon domain (GYIPEAPRDGQAYVRKDGEWVLLSTFL) and in which the RBD domains are connected through GS linkers such as GSGSGS. The DNA sequence/ORF (5′ to 3′ end) is shown in FIG. 99, and the encoded protein sequence (N- to C-terminus) is shown in FIG. 100.

[0176] In another example, the RBD domain of the Wuhan-Hu-1 reference strain, the RBD domain of the B.1.351 variant, and an RBD domain combining N501Y and L452R mutations of the B.1.1.7 and B.1.429+B.1.427 variants can be co-expressed through a polycistronic expression construct in which each RBD domain comprises at the N-terminus a signal peptide of the S antigen (MFVFLVLLPLVSSQCV) and in which the RBD domains are connected through GS linkers such as GSGSGS and P2A and T2A peptides. The DNA sequence/ORF (5′ to 3′ end) is shown in FIG. 101, and the encoded protein sequence (N- to C-terminus) is shown in FIG. 102.

[0177] In another example, the RBD domain of the Wuhan-Hu-1 reference strain, the RBD domain of the B.1.351 variant, and a RBD domain combining N501Y and L452R mutations of the B.1.1.7 and B.1.429+B.1.427 variants can be co-expressed through a polycistronic expression construct in which the RBD domains are connected through GS linkers (GSGSGS) and P2A and T2A peptides and in which each RBD domain is fused at the N-terminus to a S signal peptide (MFVFLVLLPLVSSQCV) and at the C-terminus to a T4 Foldon domain (GYIPEAPRDGQAYVRKDGEWVLLSTFL). The DNA sequence/ORF (5′ to 3′ end) is shown in FIG. 103, and the encoded protein sequence (N- to C-terminus) is shown in FIG. 104.

[0178] In another example, the RBD domain of the Wuhan-Hu-1 reference strain, the RBD domain of the B.1.351 variant, and an RBD domain combining N501Y and L452R mutations of the B.1.1.7 and B.1.429+B.1.427 variants can be co-expressed through a polycistronic expression construct comprising at the N-terminus a signal peptide of the S antigen (MFVFLVLLPLVSSQCV) and at the C-terminus TM and CT domains (without the last 19 amino acids) of the S antigen and in which the RBD domains are connected through GS linkers such as GSGSGS. The DNA sequence/ORF (5′ to 3′ end) is shown in FIG. 105, and the encoded protein sequence (N- to C-terminus) is shown in FIG. 106.

[0179] In another example, the RBD domain of the Wuhan-Hu-1 reference strain, the RBD domain of the B.1.351 VOC, and an RBD domain combining N501Y and L452R mutations of the B.1.1.7 and B.1.429+B.1.427 VOC can be co-expressed through a polycistronic expression construct in which each of the RBD domains comprises at the N-terminus a signal peptide of the S protein (MFVFLVLLPLVSSQCV) and at the C-terminus with TM domain and CT domain (without the last 19 amino acids KFDEDDSEPVLKGVKLHYT) of the S antigen and in which the RBD domains are connected through GS linkers such as GSGSGS and P2A and T2A peptide sequences. The DNA sequence/ORF (5′ to 3′ end) is shown in FIG. 107, and the encoded protein sequence (N- to C-terminus) is shown in FIG. 108.

[0180] In another embodiment, the SARS-CoV-2 N antigen sequence encodes for an N antigen which comprises one or more mutations at different amino acid positions of the N protein. These mutations or alterations may include amino acid substitutions, insertions, or deletions. The mutations maybe based on the N-specific mutations that occur in the South African VOC B.1.351, the California variant B.1.429+B.1.427, the UK variant B.1.1.7, the Brazilian variant P.1, the Indian variant B.1.617, or any other emerging SARS-CoV-2 VOC.

[0181] For example, the SARS-CoV-2 N antigen sequence encodes for an N antigen that includes the N-specific mutations that occur in the B.1.1.7 variant lineage identified in the UK. These mutations include an aspartic acid to leucine substitution at amino acid position 3 of the N protein (D3L), a serine to phenylalanine substitution at amino acid position 235 of the N protein (S235F), an arginine to lysine substitution at amino acid position 203 of the N protein (R203K), and a glycine to arginine substitution at amino acid position 204 of the N protein (G204R). The DNA sequence/ORF (5′ to 3′ end) is shown in FIG. 109, and the encoded protein sequence (N- to C-terminus) is shown in FIG. 110.

[0182] In another example, the codon-optimized SARS-CoV-2 N antigen sequence encodes for an N antigen that includes the N-specific mutations that occur in the B.1.351 variant lineage identified in South Africa. This includes a threonine to isoleucine substitution at amino acid position 205 of the N protein (T2051). The DNA sequence/ORF (5′ to 3′ end) is shown in FIG. 111, and the encoded protein sequence (N- to C-terminus) is shown in FIG. 112.

[0183] In another example, the codon-optimized SARS-CoV-2 N antigen sequence encodes for an N antigen that includes the N-specific mutations that occur in the P.1 variant lineage identified in Brazil. This includes a proline to arginine substitution at amino acid position 80 of the N protein (P80R), as well as R203K and G204R. The DNA sequence/ORF (5′ to 3′ end) is shown in FIG. 113, and the encoded protein sequence (N- to C-terminus) is shown in FIG. 114.

[0184] In another embodiment, the codon-optimized SARS-CoV-2 S antigen sequence disclosed above (based on the Wuhan-Hu-1 reference strain (#NC_045512) and optimized for vaccinia) is further modified to encode for an S antigen that includes mutations of the B.1.617 variant lineage identified in India. This may include L452R and E484Q mutations in the RBD domain, D614G, a glycine to aspartic acid substitution at amino acid position 142 of the S protein (G142D), a glutamic acid to lysine substitution at amino acid position 154 of the S protein (E154K), a proline to arginine substitution at amino acid position 681 of the S protein (P681R), a glutamine to histidine substitution at amino acid position 1071 of the S protein (Q1071H), and a histidine aspartic acid substitution at amino acid position 1101 of the S protein (H1101D). The DNA sequence/ORF (5′ to 3′ end) is shown in FIG. 115, and the encoded protein sequence (N- to C-terminus) is shown in FIG. 116.

[0185] In another embodiment, the codon-optimized SARS-CoV-2 S antigen sequence disclosed above (based on the Wuhan-Hu-1 reference strain (#NC_045512) and optimized for vaccinia) is further modified to encode for an S antigen that includes mutations or a subset of the mutations of the B.1.617 variant lineage, including L452R, E484Q, D614G, G142D, E154K, P681R, Q1071H, and H1101D, a theroneine to lysine substitution at amino acid position 478 (T478K), a threonine to isoleucine substitution at amino acid position 95 (T95I), a threonine to arginine substitution at amino acid position 19 (T19R), a lysine to threonine substitution at amino acid position 77 (K77T), a aspartic acid to asparagine substitution at amino acid 950 (D950N), an arginine to threonine substitution at amino acid position 21 (R21T), a glutamine to histidine substitution at amino acid position 218 (Q218H), a deletion of glutamic acid and phenylalanine at amino acid position 156 and 157 (Del156-157), and an arginine to glycine substitution at amino acid position 158 (R158G).

[0186] In another embodiment, the codon-optimized SARS-CoV-2 N antigen sequence encodes for an N antigen that includes the N-specific mutations that occur in the B.1.617 variant lineage identified in India. This may include an arginine to methionine substitution at amino acid position 203 of the N protein (R203M) and an aspartic acid to tyrosine substitution at amino acid position 377 of the N protein (D377Y). The DNA sequence/ORF (5′ to 3′ end) is shown in FIG. 117, and the encoded protein sequence (N- to C-terminus) is shown in FIG. 118.

[0187] In certain embodiments, the DNA sequences of two or more antigens, subunits or fragments thereof may be inserted into a single MVA insertion site or into two or more MVA insertion sites, which may be located on the same sMVA fragment or on different sMVA fragments. For example, the DNA sequences of two or more antigens, subunits or fragments thereof can be inserted in two different MVA insertion sites, both located on sMVA F1. In another example, the DNA sequences of two or more antigens, subunits or fragments thereof can be inserted into two different MVA insertion sites, one located on sMVA F1 and the other located on sMVA F2.

[0188] These insertion sites may include commonly used insertion sites such as the MVA deletion 2 (Del2) site, the intergenic region (IGR) between open reading frame (ORF) 44L and 45L (IGR44/45), the IGR between ORF 69R and 70L (IGR69/70), the IGR between 64L and 65L (IGR64/65), the Thymidine Kinase (TK) gene insertion site, or the MVA Deletion 3 (Del3) site, or any other MVA deletion site, intergenic region, or gene insertion site (ORF numbers are based on MVA strain Antoine (Accession# U94848)).

[0189] The sMVA or rsMVA expressing coronavirus antigens disclosed herein may be part of a vaccine composition that may be used in methods to treat or prevent viral infection. The vaccine composition as described herein may comprise a therapeutically effective amount of the sMVA or rsMVA as disclosed herein, and further comprising a pharmaceutically acceptable carrier according to a standard method. Examples of acceptable carriers include physiologically acceptable solutions, such as sterile saline and sterile buffered saline.

[0190] In some embodiments, the vaccine or pharmaceutical composition may be used in combination with a pharmaceutically effective amount of an adjuvant to enhance the prophylactic or therapeutic effects. Any immunologic adjuvant that may stimulate the immune system and increase the response to a vaccine, without having any specific antigenic effect itself may be used as the adjuvant. Many immunologic adjuvants mimic evolutionarily conserved molecules known as pathogen-associated molecular patterns (PAMPs) and are recognized by a set of immune receptors known as Toll-like Receptors (TLRs). Examples of adjuvants that may be used in accordance with the embodiments described herein include Freund’s complete adjuvant, Freund’s incomplete adjuvant, double stranded RNA (a TLR3 ligand), LPS, LPS analogs such as monophosphoryl lipid A (MPL) (a TLR4 ligand), flagellin (a TLR5 ligand), lipoproteins, lipopeptides, single stranded RNA, single stranded DNA, imidazoquinolin analogs (TLR7 and TLR8 ligands), CpG DNA (a TLR9 ligand), Ribi’s adjuvant (monophosphoryl-lipid A/trehalose dicorynoycolate), glycolipids (α-GalCer analogs), unmethylated CpG islands, oil emulsion, liposomes, virosomes, saponins (active fractions of saponin such as QS21), muramyl dipeptide, alum, aluminum hydroxide, squalene, BCG, cytokines such as GM-CSF and IL-12, chemokines such as MIP 1-α and RANTES, activating cell surface ligands such as CD40L, N-acetylmuramine-L-alanyl-D-isoglutamine (MDP), and thymosin α1. The amount of adjuvant used can be suitably selected according to the degree of symptoms, such as softening of the skin, pain, erythema, fever, headache, and muscular pain, which might be expressed as part of the immune response in humans or animals after the administration of this type of vaccine.

[0191] In further embodiments, use of various other adjuvants, drugs or additives with the vaccine of the invention, as discussed above, may enhance the therapeutic effect achieved by the administration of the vaccine or pharmaceutical composition. The pharmaceutically acceptable carrier may contain a trace amount of additives, such as substances that enhance the isotonicity and chemical stability. Such additives should be non-toxic to a human or other mammalian subject in the dosage and concentration used, and examples thereof include buffers such as phosphoric acid, citric acid, succinic acid, acetic acid, and other organic acids, and salts thereof; antioxidants such as ascorbic acid; low molecular weight (e.g., less than about 10 residues) polypeptides (e.g., polyarginine and tripeptide) proteins (e.g., serum albumin, gelatin, and immunoglobulin); amino acids (e.g., glycine, glutamic acid, aspartic acid, and arginine); monosaccharides, disaccharides, and other carbohydrates (e.g., cellulose and derivatives thereof, glucose, mannose, and dextrin), chelating agents (e.g., EDTA); sugar alcohols (e.g., mannitol and sorbitol); counterions (e.g., sodium); nonionic surfactants (e.g., polysorbate and poloxamer); antibiotics; and PEG.

[0192] The vaccine or pharmaceutical composition containing the sMVA or rsMVA disclosed herein may be stored as an aqueous solution or a lyophilized product in a unit or multiple dose container such as a sealed ampoule or a vial.

[0193] The sMVA, rsMVA, vaccine or pharmaceutical composition disclosed herein can be used to stimulate SARS-CoV-2-specific humoral (binding antibodies, neutralizing antibodies) and cellular (CD4+ and CD8+ T cells) immune responses for the treatment or prevention of SARS-CoV-2 infection in animal models and humans. They also can be used to produce and isolate antibody responses that can be utilized for the treatment of or passive immunization against SARS-CoV-2 infections.

[0194] Disclosed herein is an sMVA vaccine composition. COH04S1 co-expresses SARS-CoV-2 Spike and Nucleocapsid, 2 antigens implicated in protective immunity, and shows very promising immune responses in mice, hamsters, ferrets and monkeys. Favorable pre-IND FDA response was received. FDA agreed that synthetic sMVA is equivalent to traditional MVA, and that No requirement for IND-directed tox studies. City of Hope’s cGMP manufacturing facilities produced materials for Phase 1 and 2 studies. Up to 122 volunteers, age 18-54, were dosed, and 55 volunteers received either 1 or 2 doses.

[0195] The vaccine composition also comprises the N antigen, which elicits strong T cell response. The vaccine composition lacks gender dependency and is effective across age groups, e.g., from 2-year old to 75-year old. Strong immunogenicity was achieved even at lowest evaluated clinical dose. The vaccine composition achieved protection from severe disease in hamsters. The vaccine composition exhibits Th1-biased antibody and T cell response.

[0196] In some embodiments, the vaccine composition disclosed herein is formulated for nasal delivery for mucosal protection. Alternatively, the vaccine composition disclosed herein is formulated for intraperitoneal (IP), intramuscular (IM) or intranasal (IN) administration to induce strong immune responses in a subject. In certain embodiments, the vaccine composition is administered at 1 × 10⁷ PFU to 10 × 10⁸ PFU per dose, 1-10 × 10⁸ PFU per dose, or 1-5 × 10⁸ PFU per dose. In some embodiments, the vaccine composition is administered at about 1 X 10⁷ PFU per dose, about 2 × 10⁷ PFU per dose, about 3 × 10⁷ PFU per dose, about 4 × 10⁷ PFU per dose, about 5 × 10⁷ PFU per dose, about 6 × 10⁷ PFU per dose, about 7 × 10⁷ PFU per dose, about 8 × 10⁷ PFU per dose, about 9 × 10⁷ PFU per dose, about 1 × 10⁸ PFU per dose, about 2 × 10⁸ PFU per dose, about 3 × 10⁸ PFU per dose, about 4 × 10⁸ PFU per dose, about 5 × 10⁸ PFU per dose, about 6 × 10⁸ PFU per dose, about 7 × 10⁸ PFU per dose, about 8 × 10⁸ PFU per dose, about 9 × 10⁸ PFU per dose, or about 10 × 10⁸ PFU per dose. In certain embodiments, the vaccine composition is administered to a subject in a single dose. In certain embodiments, the vaccine composition is administered to a subject in a first dose, followed by a booster dose. The vaccine composition disclosed herein stimulates potent humoral and cellular immune responses against SARS-CoV-2 upon administration to a subject.

[0197] As demonstrated in the working examples, healthy adults immunized with COH04S1 at a dose of 1 × 10⁷ PFU developed binding antibodies to S, RBD, N and neutralizing antibodies, as well as functional T Cell responses to S and N antigens.

[0198] Also illustrated herein is pre-clinical vaccine production process from the initial virus reconstitution to the generation of the final pre-clinical virus stock, as illustrated in FIG. 56. The process includes the steps of transfection/infection with plasmids containing sMVA fragments, sMVA virus reconstitution, primary small scale expansion, primary large scale expansion, primary in vivo testing for immunogenicity, efficacy, and safety, plaque purification, expansion of virus isolates, secondary small scale expansion, secondary large scale expansion, and final in vitro and in vivo testing, as demonstrated in the working examples. This process can be further modified, improved, or optimized based on the production needs using common knowledge in the field.

### Steps 1 and 2: Transfection/infection and sMVA Virus Reconstitution

[0199] The three plasmids containing the three sMVA fragments F1-F3 (unmodified, modified, or a combination thereof) are isolated from E. coli by alkaline lysis. The isolated plasmids are co-transfected by Fugene HD lipid-based transfection reagent (Roche) into 60-70% confluent BHK-21 cells (ATCC® CCL-10™) that have been seeded the day before in a 6-well plate tissue culture format and grown in minimum essential medium (MEM, Gibco) with 10% fetal bovine serum (MEM10) at 37° C. in a 5% CO₂ incubator. At 4 hours post transfection, the BHK-21 cells are infected at approximately 0.1 to 1 multiplicity of infection (MOI) with FPV (ATCC VR-2553) to initiate sMVA virus transcription and reconstitution. The transfected/infected BHK-21 cells are incubated for 2 days in MEM10 in a 6-well tissue culture plate at 37° C. in a 5% CO₂ incubator and every other day transferred, re-seeded, and grown for two days in larger tissue culture plates over a period of 8-12 days as illustrated in FIG. 56 (Step 2) until most or all of the BHK-21 cells show signs of sMVA virus infection. Characteristic MVA viral plaque formation and cytopathic effects (CPEs) indicating sMVA virus reconstitution is usually detected at 4-8 days post transfection/infection. Fully infected BHK-21 cell monolayers are usually visible at 8-12 days post transfection/infection. sMVA virus from the infected BHK-21 cell monolayers are prepared in MEM with 2% FBS (MEM2) by 3 cycles of conventional freeze/thaw method and stored at -80° C. sMVA from these initial virus stocks is titrated on BHK-21 cells and usually characterized by various methods (PCR, Western Blot (WB), flow cytometry (FC)) to confirm sMVA reconstitution and antigen expression.

### Steps 3 and 4: Primary Small and Large Scale Expansion

[0200] To produce larger virus amounts for more vigorous in vitro and in vivo testing, the reconstituted sMVA virus from the initial virus stocks (Steps 1 and 2) is expanded in a two-step process, involving a first small-scale expansion on BHK-21 cells and a subsequent large- scale expansion on chicken embryo fibroblast (CEF) cells. For small scale expansion (step 3), BHK-21 cells seeded in 5×150 mm tissue culture dishes are allowed to grow to 80-90% confluency and infected at 0.02 MOI with the sMVA from the initial virus stocks. The infected BHK-21 cells are incubated for 2-3 days in MEM10 at 37° C. in a 5% CO₂ incubator. Virus stocks from the small-scale expansion are prepared by 3 cycles of freeze/thaw method, stored in MEM2 in a -80° C. freezer, and subsequently titrated on BHK-21 cells. sMVA virus from the small-scale expansion is characterized in vitro (PCR, WB, FC) to verify identity, genome reconstitution, and antigen expression. At this point of the development process, the sMVA virus may also undergo stability testing following propagation of 5-10 passages on CEF. For large scale expansion (step 4), freshly prepared CEF seeded in 30×150 mm tissue culture dishes are allowed to grow to 70-90% confluency and infected at 0.02 MOI with the sMVA virus prepared from the small-scale expansion. The infected CEF cells are grown for 2-3 days in MEM10 at 37° C. in a 5% CO₂ incubator. Virus from the large- scale expansion is prepared by 36% sucrose density ultracentrifugation, stored at -80° C. in 1 mM Tris-HCl (pH 9), and subsequently titrated on CEF cells. The purified virus is characterized in vitro by PCR, WB, and FC (or other methods) to confirm identity, fidelity of genome reconstitution, and antigen expression.

### Step 5: Primary in Vivo Testing

[0201] Following in vitro characterization, the purified virus from the large-scale expansion is used for in vivo studies to assess immunogenicity, protection against challenge, and safety of the vaccine candidates in different animal models. This may include studies in mice, but also studies in other animal models such as hamsters, ferrets, or non-human primates. Dose escalation and immunization routes can be tested to assess optimal conditions for immunogenicity, and protection against viral challenge.

### Steps 6 and 7: Plaque Purification and Expansion of Virus Isolates

[0202] For the transition into clinical production, selected sMVA vaccine constructs (selected based on results under step 4 and 5) are plaque purified, expanded, and re-tested by in vitro and in vivo studies. From this point on, all steps of the production process are conducted under serum-free conditions using VP-SFM medium (Gibco). For the plaque purification procedure (Step 6), freshly prepared CEF cells (80-90% confluent) seeded the day before in a 96-well tissue culture plate are infected at 10-100 PFU/plate with sMVA virus from the primary small-scale expansion (step 3). At 3-5 days post infection, the CEF cells of the 96-well plates are screened for single viral plaque formation per well and sMVA virus isolates from single wells are prepared by 3 cycles of freeze/thaw method. The virus isolates prepared from single wells are then expanded though infection of 80-90% confluent CEF cells seeded in 24-well tissue culture plate (1 virus isolate/well; Step 7, FIG. 56). At 2-4 days post infection, the virus isolates expanded in the 24-well plates are prepared by freeze/thaw method and further expanded at 1 isolate/dish on 80-90% confluent CEF seeded in 60 mm tissue culture dishes. The infected CEF cells are grown for 2-4 days and the expanded virus isolates harvested by freeze/thaw method and titrated on CEF. The titrated virus isolates (5-10) are then screened by in vitro testing using PCR, WB and FC to evaluate the identity, genome composition, and antigen expression of the single virus isolates.

### Steps 8 and 9: Secondary Small and Large Scale Expansion

[0203] As a next step, selected plaque purified virus isolates of the sMVA vaccine candidates are further expanded in a two-step process involving a secondary small scale and secondary large scale expansion to produce large amounts of virus for vigorous in vitro and in vivo testing of the final isolates. The secondary expansion procedure principally follows the primary expansion procedure of the pre-clinical vaccine development process (FIG. 56, Steps 3 and 4 and steps 8 and 9), except that the secondary expansion procedure uses CEF cells grown exclusively under serum-free conditions (VP-SFM). Virus stocks from the large scale expansion are prepared by ultracentrifugation and stored at -80° C. in 1 mM Tris-HCl (pH 9). Final purified virus stocks are characterized in vitro by PCR, WB and FC to confirm the identity, genome composition, and antigen expression of the selected virus isolates of the sMVA vaccine candidates.

### Step 10: Final in Vitro and in Vivo Testing

[0204] Following initial in vitro testing of the final products, the selected virus isolates are further evaluated in vitro for host range, replication kinetics, vaccine stability, and sequencing of the complete genome. In addition, immunogenicity, protection against challenge, and safety of the final virus isolates of the sMVA vaccine candidates are investigated in animal models (mice, or other animals).

[0205] Also disclosed herein are various prime-boost procedures. In some embodiments, a prime-boost procedure comprises a first and second immunizations or additional booster immunizations by the same sMVA vector encoding two or more SARS-CoV-2 antigen sequences of the Wuhan-Hu-1 reference strain or different variants of concern. In some embodiments, a prime-boost procedure comprises a first and second immunization or additional booster immunizations by a mixture of two or more sMVA vectors that encode two or more different SARS-CoV-2 antigen sequences selected from the Wuhan-Hu-1 reference strain and different variants of concern. In some embodiments, a prime-boost procedure that includes a first immunization with a sMVA vector encoding one or more SARS-CoV-2 antigen sequences of the Wuhan-Hu-1 reference strain and a second immunization with different sMVA vector encoding one or more SARS-CoV-2 antigen sequences of different variants of concern, or vice versa. In some embodiments, a prime-boost procedure comprises multiple immunization with an sMVA vector encoding one or more SARS-CoV-2 antigen sequences of the Wuhan-Hu-1 reference strain and multiple booster immunization with different sMVA vector encoding one or more SARS-CoV-2 antigen sequences of different variants of concern, or vice versa.

[0206] In this disclosure, COH04S1 has an sMVA-N/S vector construction as illustrated in FIG. 5 and FIG. 17. COH04S1 is the clinical product derived by double-plaque purification from the parental sMVA-N/S vector C35 (a.k.a., sMVA-N/S tv) as illustrated in FIG. 57. As used herein, the terms “sMVA-CoV2 vector” and “sMVA-SARS-CoV2 vector” may be used interchangeably to refer to sMVA vectors expressing one or more SARS-CoV2 antigens.

[0207] The following examples are intended to illustrate various embodiments of the invention. As such, the specific embodiments discussed are not to be constructed as limitations on the scope of the invention. It will be apparent to one skilled in the art that various equivalents, changes, and modifications may be made without departing from the scope of invention, and it is understood that such equivalent embodiments are to be included herein. Further, all references cited in the disclosure are hereby incorporated by reference in their entirety, as if fully set forth herein.

### EXAMPLES

### Materials and Methods

[0208] Cells and Viruses: BHK-21 (CCL-10), A549 (CCL-185), HeLa (CCL-2), 293T (CRL-1573), 143B (CRL-8303), MRC-5 (CCL-171), HEK293/17 (CRL11268), THP-1 (TIB-202), ARPE-19 (CRL-2302) were purchased from the American Type Culture Collection (ATCC) and grown according to ATCC recommendations. CEF were purchased from Charles River (10100795) and grown in minimum essential medium (MEM) with 10% FBS (MEM10). HEK293T/ACE2 were a kind gift of Pamela J. Bjorkman⁴⁶. The wtMVA (NIH Clone 1) was used solely as a reference standard. To produce sMVA and wtMVA virus stocks, CEF were seeded in 30×150 mm tissue culture dishes, grown to about 70-90% confluency, infected at 0.02 multiplicity of infection (MOI) with sMVA or wtMVA. Two days post infection, purified virus was prepared by 36% sucrose density ultracentrifugation and virus resuspension in 1 mM Tris-HCl (pH 9)⁴⁷. Virus stocks were stored at -80° C. Virus titers were determined on CEF by immunostaining of viral plaques at 16-24 hours post infection using polyclonal Vaccinia antibody. FPV stocks were produced following propagation on CEF using FPV strain TROVAC (ATCC VR-2553)³ or HP1.441⁴, kindly provided by Bernard Moss. FPV titers were evaluated on CEF by virus plaque determination. SARS-CoV-2 strain USA-WA1/2020 (BEI Resources NR-52281) was used in the focus reduction neutralization test (FRNT) assay⁵³.

[0209] Construction of sMVA fragments: The three about 60 kbp sMVA fragments (F1-F3; FIG. 1) comprising the complete MVA genome sequence reported by Antoine et al. (NCBI Accession# U94848)⁴ were constructed as follows: sMVA F1 contained base pairs 191-59743 of the MVA genome sequence; sMVA F2 comprised base pairs 56744-119298 of the MVA sequence; and sMVA F3 included base pairs 116299-177898 of the reported MVA genome sequence⁴. A CR/HL/CR sequence arrangement composed of

5'-TTT TTT TCT AGA CAC TAA ATA AAT
AGT AAG ATT AAA TTA ATT ATA AAA TTA TGTATA TAA TAT TAA TTA TAA AAT
TAT GTA TAT GAT TTA CTA ACT TTA GTT AGA TAA ATT AAT AAT ACA TAA
ATT TTA GTA TAT TAA TAT TAT AAA TTA ATA ATA CAT AAA TTT TAG TAT ATT
AATATTATA TTT TAA ATA TTT ATT TAG TGT CTA GAA AAA AA-3'

was added in the same orientation to both ends of each of the sMVA fragments, wherein the italicized letters indicate the duplex copy of the MVA terminal HL sequence and the underlined letters indicate the CR sequences. Notably, the CR/HL/CR sequences incorporated at the ITRs of sMVA F1 and F3 were added in identical arrangement as the CR/HL/CR sequences occur at the ITRs at the genomic junctions of putative MVA replication intermediates⁴. The sMVA fragments were produced and assembled by Genscript using chemical synthesis, combined with a yeast recombination system. All sMVA fragments were cloned into a yeast shuttle vector, termed pCCI-Brick, which contains a mini-F replicon for stable propagation of large DNA fragments as low copy BACs in E. coli. sMVA F1 and F3 were cloned and maintained in EPI300 E. coli (Epicentre), while sMVA F1 was cloned and maintained in DH10B E. coli (Invitrogen).

[0210] Antigen insertion: SARS-CoV-2 S and N antigen sequences were inserted into the sMVA fragments by En passant mutagenesis in GS1783 E. coli cells^{48,49}. Briefly, transfer constructs were generated that consisted of the S or N antigen sequence with upstream mH5 promoter sequence and downstream Vaccinia transcription termination signal (TTTTTAT), and a kanamycin resistance cassette flanked by a 50 bp gene duplication was introduced into the antigen sequences. The transfer constructs were amplified by PCR with primers providing about 50 bp extensions for homologous recombination and the resulting PCR products were used to insert the transfer constructs into the sMVA DNA by a first Red-recombination reaction^{48,49}. Primers

5'- AAA AAA TAT ATT ATT TTT ATG TTA TTT TGT TAA AAA TAA TCA TCG AAT ACG AAC TAG TAT AAA AAG GCG CGC C-3' and 5'-GAA GAT ACC AAA ATA GTA AAG ATT TTG CTA TTC AGT GGA CTG GAT GAT TCA
AAA ATT GAA AAT AAA TAC AAA GGT TC-3'

were used to insert the N antigen sequence into the Del2 site. Primers

5'- ATA TGA ATA TGA TTT CAG ATA CTA TAT TTG TTC CTG TAG ATA ATA ACT AAA AAT TTT TAT CTA GTA TAA AAA
GGC GCG CC-3' and 5'-GGA AAA TTT TTC ATC TCT AAA AAA AGA TGT GGT CAT TAG AGT TTG ATT TTT ATA AAA ATT GAA AAT AAA TAC AAA GGT TC-3'

were used to insert the S antigen sequence into the IGR69/70 insertion site primers. Primers

5'- TTG GGG AAA TAT GAA CCT GAC ATG ATT AAG ATT GCT CTT TCG GTG GCT GGT AAA AAA TTG AAA ATA AAT ACA AAG GTT C-3' and 5'-ACA AAA TTA TGT ATT TTG TTC TAT CAA CTA CCT ATA AAA CTT TCC AAA TAC TAG
TAT AAA AAG GCG CGC C-3'

were used to insert the S or N antigen sequence into the Del3 site. Underlined letters indicate the sequences used to produce about 50 bp extensions for homologous recombination. The S and N antigen sequences were based on the SARS-CoV-2 reference strain (NCBI Accession# NC_045512) and codon-optimized for Vaccinia^{10,38}. Codon-optimized S and N gene sequences were synthesized by Twist Biosciences. The transfer constructs were amplified by PCR with Phusion polymerase (Thermo Fisher Scientific) using primers providing ~50 bp extensions for homologous recombination to insert the transfer constructs into the sMVA fragments by Red-recombination. Inserted antigen sequences were verified by PCR, restriction enzyme digestion, and sequencing. The amplified PCR products were purified using the NucleoSpin Gel and PCR clean-up kit (Macherey-Nagel) and 100 ng of PCR product was electroporated at 15 kV/cm, 25 µF, and 200 Ω into 50 µL of recombination-competent GS1783 bacteria harboring the sMVA fragments. The bacteria were re-suspended in 1 mL of Luria- Bertani (LB) medium without antibiotics and incubated for 2 h at 32° C. and 220 r.p.m. After 2 h of incubation, the bacteria were streaked onto LB agar plates with 30 µg/mL chloramphenicol and 30 µg/mL kanamycin and incubated at 32° C. for 2 days. Bacterial clones harboring sMVA fragments with inserted antigen sequences at the respective MVA insertion sites were identified by PCR and restriction pattern analysis. To seamlessly remove the kanamycin resistance marker from the inserted antigen sequences by a I-Scel-mediated second Red- recombination reaction, 100 µL of an overnight culture of selected bacterial clones was added to 900 µL of LB medium containing 30 µg/mL chloramphenicol and incubated for 1.5-2 h at 32° C. and 220 r.p.m. Subsequently, 1 mL of LB containing 30 µg/mL chloramphenicol and 2% L-arabinose was added to induce the expression of the I-Scel homing endonuclease enzyme and to induce a double-strand break at the 50 bp gene duplication. The bacteria were incubated for 1 h at 32° C. and then transferred to a water bath and incubated for 30 min at 220 r.p.m. and 42° C. to induce the expression of the Red-recombination proteins and to mediate the removal of the kanamycin resistance marker by recombination of the 50 bp gene duplication. After an additional incubation period of the bacteria for 2 h at 32° C. and 220 r.p.m., the bacteria were streaked onto LB agar plates with 30 µg/mL chloramphenicol and 1% L-arabinose and incubated at 32° C. for 2 days. Bacterial clones harboring sMVA fragments with seamlessly removed kanamycin marker from the inserted antigen sequences were identified by PCR, restriction pattern analysis, and Sanger sequencing.

[0211] sMVA virus reconstitution: sMVA virus reconstitution from the three sMVA DNA plasmids in BHK-21 cells using FPV as a helper virus was performed as follows⁸⁻¹⁰. The three sMVA DNA plasmids were isolated from E. coli by alkaline lysis⁵⁰ and co-transfected into 60-70% confluent BHK-21 cells grown in 6-well plate tissue culture plates using Fugene HD transfection reagent (Roche) according to the manufacturer’s instructions. At 4 hours post transfection, the cells were infected with approximately 0.1-1 MOI of FPV to initiate the sMVA virus reconstitution. The transfected/infected BHK-21 cells were grown for 2 days and then every other day transferred, re-seeded, and grown for additional two days in larger tissue culture formats over a period of 8-12 days until most or all of the cells showed signs of sMVA virus infection. Using this procedure, characteristic MVA viral plaque formation and cytopathic effects (CPEs) indicating sMVA virus reconstitution was usually detected at 4-8 days post transfection/infection. Fully infected BHK-21 cell monolayers were usually visible at 8-12 days post transfection/infection. sMVA virus from infected BHK-21 cell monolayers was prepared by conventional freeze/thaw method and passaged once on BHK-21 cells before producing purified virus stocks on CEF. sMVA or recombinant sMVA-CoV-2 vectors were reconstituted either with FPV HP1.441 (sMVA hp, sMVA-N/S, sMVA-S/N hp) or TROVAC (sMVA tv1 and tv2, sMVA-S tv, sMVA-N tv, sMVA-N/S tv, sMVA-S/N tv).

[0212] Host cell range: sMVA and wtMVA host cell range using various human cell lines (HeLa, 293T, MRC-5, A549, and 143B) BHK-21 cells, and CEF was determined as follows. The cells were seeded in 6-well plate tissue culture format and at 70-90% confluency infected in duplicates with 0.01 MOI of sMVA or wtMVA using MEM2. At 2 hours post infection, the cells were washed twice with PBS and incubated for two days in normal growth medium (as described under cells and viruses). After the incubation period, virus was prepared by conventional freeze/thaw method and the virus titers of each duplicate infection were determined in duplicate on CEF.

[0213] Replication kinetics: To compare the replication kinetics of sMVA and wtMVA, CEF or BHK-21 cells were seeded in 6 well-plate tissue culture format and at 70-90% confluency infected in triplicates at 0.02 MOI with sMVA or wtMVA using MEM2. After 2 hours of incubation, the cells were grown in MEM10. At 24 and 48 hours post infection, virus was prepared by freeze/thaw method and the virus titers of each triplicate infection and the inoculum was determined in duplicate on CEF.

[0214] Plaque size analysis: To compare the plaque size of sMVA virus and wtMVA, CEF or BHK-21 cells were seeded in 6-well plate tissue culture format and at 70-90% confluency infected with 0.002 MOI with sMVA or wtMVA using MEM2. After 2 hours of incubation, MEM10 was added and the cells were grown for 16-24 hours. The cell monolayers were stained with Vaccinia virus polyclonal antibody and viral plaques were imaged using Leica DMi8 inverted microscope and measured using LAS X software. The size of 25 viral plaques per sMVA or wtMVA was calculated using the formula Area= π×a×b, where a and b are the major and minor radius of the ellipse, respectively.

[0215] PCR analysis: To characterize the viral DNA of the sMVA vectors by PCR, CEF were seeded in 6-well plate tissue culture format and at 70-90% confluency infected at 5 MOI with sMVA or wtMVA. DNA was extracted at 16-24 hours post infection by the DNA Easy Blood and Tissue Kit (Qiagen) according to the manufacturer’s instructions. All PCR reactions were performed with Phusion polymerase (ThermoFisher Scientific). Primers 5′-TCG TGG TGT GCC TGA ATC G-3′ and 5′-AGG TAG CGA CTT CAG GTT TCT T-3′ were used to detect MVA ITR sequences; primers 5′-TAT CCA CCA ATC CGA GAC CA-3′ and 5′-CCT CTG GAC CGC ATA ATC TG-3′ were used to verify the transition from the left ITR into the unique region; primers 5′-AGG TTT GAT CGT TGT CAT TTC TCC-3′ and 5′- AGA GGG ATA TTA AGT CGA TAG CCG-3′ were used to verify the Del2 site with or without inserted N antigen sequence; primers 5′-TGG AAT GCG TTC CTT GTG C-3′ and 5′-CGT TTT TCC CAT TCG ATA CAG-3′ with binding sites flanking the F1/F2 homologous sequences were used to verify the F1/F2 recombination site; primers 5′-TAT AGT CTT TGT GGC ATC CGT TG-3′ and 5′-ACC CAA ACT TTA GTA AGG CCA TG-3′ were used to verify the IGR69/70 insertion site with or without inserted S antigen; primers 5′-ATA AGC GTT GTC AAA GCG GG-3′ and 5′-AGG AAA TAG AAA TTG TTG GTG CG-3′ with binding sites flanking the F2/F3 homologous sequences were used to verify the F2/F3 recombination site; primers 5′-ACA TTG GCG GAC AAT CTA AAA AC-3′ and 5′-ATC ATC GGT GGT TGA TTT AGT AGT G-3′ were used to verify the Del3 insertion site with and without inserted S or N antigen sequences; primers 5′-TAT CCA CCA ATC CGA GAC CA-3′ and 5′-GTC TGT CCG TCT TCT CTA TTG TTT A-3′ were used to verify the transition from the unique region into the right ITR; and primers 5′-TTA ACT CAG TTT CAA TAC GGT GCA G-3 and 5′-TGG GGT TTC TTC TCA GGC TAT C-3′ were used to detect the SopA element of the BAC vector. PCR products were analyzed by agarose gel electrophoresis and imaged using Syngene PXi6 imager with GeneSys (v1.5.4.0) software. Uncropped gel images are provided as Source Data file. To sequence the PCR products derived from the sMVA vectors, the amplified PCR products were purified using the NucleoSpin Gel and PCR Clean-up Kit (Macherey-Nagel) according to the manufacturer’s instructions and analyzed by Sanger sequencing.

[0216] Restriction pattern analysis: BHK-21 cells were seeded in 20×150 mm tissue culture dishes, grown to about 70-90% confluency, and infected at 0.01 MOI with wtMVA, sMVA tv1, or sMVA tv2. The purified virus was prepared two days post-infection as previously described⁴⁷. Viral DNA (vDNA) was phenol/chloroform extracted, followed by ethanol precipitation as previously described⁵¹. Briefly, isolated virus particles were resuspended in lysis buffer (50 mM Tris-HCl pH 8.0, 1.2% SDS, 4 mM EDTA pH 8.0, 4 mM CaCl2, and 0.4 mg/mL proteinase K) and incubated overnight at 37° C. DNA was extracted twice with phenol; each extraction was performed by adding an equal volume of buffered phenol and centrifugation at room temperature (RT) for 10 min at 300 × g. Aqueous phase was carefully collected to avoid DNA shearing. Final extraction was performed by adding equal volume of 1:1 phenol/chloroform to aqueous phase, followed by centrifugation as described above, and completed by ethanol precipitation of phenol/chloroform extracted viral DNA. DNA concentration and A260/A280 ratios were determined using NanoVue (GE Healthcare Bio-sciences Corp). 10 µg of vDNA were digested with 3 units of either Kpnl or Xhol, followed by visualization on 0.5% EtBr-stained agarose gel that was run at 2.4v/cm, overnight. Images were acquired using Syngene PXi6 imager with GeneSys (v1.5.4.0) software.

[0217] Sequencing of sMVA fragments and sMVA vectors: PacBio (Pacific Biosciences) Long Read Sequencing analysis was used to determine the sequences of the cloned sMVA fragments (F1-F3) and reconstituted sMVA vectors. Plasmid DNA for sequencing the sMVA fragments was isolated by Q IAGEN Large-Construct Kit according to the manufacturer’s instructions. Viral DNA for sequencing sMVA was isolated from purified virus particles by phenol/chloroform extraction as disclosed above. Viral DNA for sequencing the sMVA-CoV2 vectors was isolated from purified virus particles by NucleoSpin Blood QuickPure DNA extraction kit (Macherey-Nagel) according the manufacturer’s instructions. Briefly, 5 µg of fragmented DNA was converted to barcoded SMRTbell libraries using the SMRTbell Template Prep Kit 1.0 and Barcoded Adapter Plate-96 (PacBio). Libraries of the sMVA fragments and sMVA vector were size-selected (7-kb size cutoff) with BluePippin (Sage Science). After polymerase binding to the libraries with sequencing primers, the polymerase complexes were loaded into RSII SMRT cells using MagBeads loading and sequenced on PacBio RSII with 6 h movie. The polymerase complexes of sMVA-CoV2 vectors were loaded into a Sequel SMRT cell using diffusion mode and sequenced on PacBio Sequel with 10 h movie. Read demultiplexing, read mapping to the reference sequences, and Circular Consensus Sequencing (CCS) analyses were performed by Demultiplex Barcodes, Resequencing, and CCS modules, respectively, either in SMRT Portal (v. 2.3.0) or SMRT Link (v6.0.0.47841) or SMRT Link (v8.0.0.80529). The variants calling with CCS reads were carried out using VarScan v2.3.9 after mapping CCS reads using pbmm2v 1.0.0. De novo assembly was done using canu v1.7.1. The 5′ start position of the assembled contig was edited by comparing to the references. MVA U94848.1 was used as a reference for mapping the reads of the sMVA genome sequence. Sequences of the sMVA fragments and sMVA-CoV2 vectors were mapped via alignment with corresponding reference sequences based on MVA U94848.1 that were constructed by Vector NTI (Invitrogen, v. 11.5). Along with the comparison of de novo assembled contig to each reference, this analysis confirmed the sequence identity of the cloned sMVA fragments and reconstituted sMVA vectors, including a single point mutation in a non-coding determining region at 3 base pairs downstream of 021L4 that was found in sMVA fragment F1 and all sequenced reconstituted sMVA vectors (sMVA and sMVA-CoV-2 vectors). An additional variation (point mutation) that could not be unambiguously excluded was found in a non-coding determining region at the tandem repeats 88 bp from the end of the ITR within sMVA fragment F3. As these two variations were present in the cloned sMVA fragments, they were confirmed as errors originating during the chemical synthesis of the sMVA fragments. The internal unique region and unique regions of the ITRs encompassing the complete MVA coding content could be reliably assembled for all reconstituted sMVA vectors. The sequence contig of the sMVA vector covered almost (over 99%) the complete U94848.1 reference sequence, with only a few exceptions at the highly repetitive ITR tandem repeats. The complete regions of the ITR tandem repeats of the sMVA-CoV2 vectors could not be reliably mapped through alignment with the reference sequences or de novo assembly due to low coverage at these regions, likely as a result of the quality of the sequence reads. Reference sequences of the sMVA fragments and sMVA-CoV2 vectors based on the PacBio sequencing were deposited in NCBI. To determine the absence of contaminating BAC vector sequences in the raw sequencing data of the reconstituted sMVA vectors, the sequencing reads were aligned onto the reference pCCI-Brick vector sequence provided by Genscript using the resequencing module in SMRT Link (v8.0.0.80529).

[0218] Immunoblot analysis: BHK-21 cells infected at 5 MOI were harvested 24-hours post infection. Proteins were solubilized in PBS with 0.1% Triton X-100, supplemented with protease inhibitor, then reduced and denatured in Laemmli buffer containing DTT and boiled at 95° C. for about 10 minutes. Proteins were resolved on a 4-20% Mini Protean TGX gradient gel (BioRad), and transferred onto PVDF membrane. S protein was probed with anti-SARS-CoV-1 S1 subunit rabbit polyclonal antibody (40150-T62-COV2, Sino Biological); N protein was probed with anti-SARS-CoV1 NP rabbit polyclonal antibody (40413-T62, Sino Biological). Vaccinia BR5 protein was probed as a loading control. Anti-rabbit polyclonal antibody conjugated with horseradish peroxidase (Sigma-Aldrich) was used as a secondary antibody and protein bands were visualized with chemiluminescent substrate (ThermoFisher).

[0219] Flow cytometry. HeLa cells were seeded in a 6-well plate (5×10⁵/well) and infected the following day with sMVA vaccine candidates at an MOI of 5. Following an incubation of 6 hours, cells were detached with non-enzymatic cell dissociation buffer (Cat. No. 13151014, GIBCO). Cells were either incubated directly with primary antibody or fixed and permeabilized prior to antibody addition. Anti-SARS-CoV-1 S1 mouse (40150-R007, Sino Biological) and S2 rabbit (GTX632604, GeneTex) monoclonal antibodies, anti-SARS-CoV-1 N rabbit monoclonal antibody (40143-R001, Sino Biological), and anti-vaccinia rabbit polyclonal antibody (9503-2057, Bio Rad) were used in dilution 1:2,000. One hour later anti-mouse or anti-rabbit Alexa Fluor 488-conjugated secondary antibodies (A11001, A21206; Invitrogen) were added to the cells at a dilution of 1:4,000. Live cells were ultimately fixed with 1% paraformaldehyde (PFA) and acquired using a BD FACSCelesta flow cytometer with BD FACSDiva software (v8.0.1.1). Analysis was performed using FlowJo (v10.6.2).

[0220] Immunofluorescence: BHK-21 or HeLa cells were grown on glass coverslips and infected with sMVA or recombinant sMVAs encoding S and/or N proteins at an MOI of 5 for 6 hours at 37° C. in a humidified incubator (5% CO₂). After infection, cells were fixed for 15 minutes in 2% PFA and then directly permeabilized by addition of ice cold 1:1 acetone/methanol for 5 minutes on ice. Cells were blocked for 1 hour with 3% BSA at room temperature, incubated with primary antibody mix (1:500) against the S2 subunit or N for 1 hour at 37° C., and then incubated with Alexa-conjugated secondary antibodies (ThermoFisher) (1:2000) for 1 hour at 37° C., with washing (PBS + 0.1% Tween20) between each step. For detection of cell membranes and nuclei, cells were incubated with Alexa-conjugated wheat germ agglutinin at 5 µg/mL (ThermoFisher) and DAPI for 10 minutes at room temperature. Coverslips were washed and mounted onto slides with Fluoromount-G (SouthernBiotech). Microscopic analysis was performed using a laser-scanning confocal microscope (Zeiss, LSM700). Images were acquired and processed using Zen software (Zeiss, Black Edition Version 8.1).

[0221] Mouse immunization: The Institutional Animal Care and Use Committee (IACUC) of the Beckman Research Institute of City of Hope (COH) approved protocol 20013 assigned for this study. All study procedures were carried out in strict accordance with the recommendations in the Guide for the Care and Use of Laboratory Animals and the Public Health Service Policy on the Humane Care and Use of Laboratory Animals. 6 weeks old C57BL/6 (C57BL/6J, 000664) or Balb/c (BALB/cJ, 000651) were purchased from the Jackson laboratories. C57BL/6 Nramp were bred at the City of Hope animal facility. Mice (N=4-5) were immunized twice in three-week intervals by intraperitoneal route with 5×10⁷ PFU (high dose) or 1×10⁷ PFU (low dose) of sMVA, wtMVA, or sMVA-CoV2 vectors. To determine immune stimulation by both the S and N antigen when using separate vectors (FIGS. 15-16), mice were co-immunized via the same immunization schedule and route with half of the high (2.5×10⁷ PFU) or low dose (0.5×10⁷ PFU) of each of the vaccine vectors. Blood samples for humoral immune analysis were collected by retro-orbital bleeding two weeks post-prime and one-week post booster immunization. Splenocytes for cellular immune analysis were collected at one-week post booster immunization and were isolated by standard procedure after animals were humanely euthanized.

[0222] Binding antibodies: Binding antibodies in mice immunized with sMVA, wtMVA, or sMVA-CoV2 vectors were evaluated by ELISA. ELISA plates (3361, Corning) were coated overnight with 1 µg/ml of MVA expressing Venus fluorescent marker⁹, S (S1+S2, 40589-V08B1, Sino Biological), RBD (40592-V08H, Sino Biological) or N (40588-V08B, Sino Biological). Plates were blocked with 3% BSA in PBS for 2 hours. Serial dilutions of the mouse sera were prepared in PBS and added to the plates for two hours. After washing, 1:3,000 dilution of HRP-conjugated anti-mouse IgG secondary antibody (W402B, Promega) was added and incubated for one additional hour. Plates were developed using 1-Step Ultra TMB-ELISA (34028, Thermo Scientific) for one to two minutes after which the reaction was stopped with 1 M H2SO4. Plates were read at 450 nm wave length using FilterMax F3 microplate reader (Molecular Devices). Binding antibody endpoint titers were calculated as the last serum dilution to have an absorbance higher than 0.1 absorbance units (OD) or higher than the average OD in mock immunized mice plus 5 times the standard deviation of the OD in the same group at the same dilution. For evaluation of the IgG2a/IgG1 ratio, mouse sera were diluted 1:10,000 in PBS. The assay was performed as described above except for the secondary antibodies (1:2,000. goat Anti-Mouse IgG2a cross absorbed HRP antibody, Southern biotech, 1083-05; Goat anti-Mouse IgG1 cross absorbed HRP antibody, Thermo Scientific, A10551). The IgG2a/IgG1 ratio was calculated by dividing the absorbance read in the well incubated with the IgG2a secondary antibody divided by the absorbance for the same sample incubated with the IgG1 antibody.

[0223] MVA neutralization assay. ARPE-19 cells were seeded in 96 well plates (1.5×10⁴ cells/well). The following day, serial dilutions of mouse sera were incubated for 2 hours with MVA expressing the fluorescent marker Venus10 (1.5×10⁴ PFU/well). The serum-virus mixture was added to the cells in duplicate wells and incubated for 24 hours. After the 24-hour incubation period, the cells were imaged using a Leica DMi8 inverted microscope. Pictures from each well were processed using Image-Pro Premier (Media Cybernetics) and the fluorescent area corresponding to the area covered by MVA-Venus infected cells was calculated.

[0224] SARS-CoV-2 pseudovirus production: The day before transfection, HEK293T/17 were seeded in a 15 cm dish at a density of 5×10⁸ cells in DMEM supplemented with 10% heat inactivated FBS, non-essential amino acids, HEPES, and glutamine⁵². Next day, cells were transfected with a mix of packaging vector (pALDI-Lenti System, Aldevron), luciferase reporter vector and a plasmid encoding for the wild type SARS-CoV2 Spike protein (Sino Biological) or vesicular stomatitis virus G (VSV-G, Aldevron), using FuGENE6 (Roche) as a transfection reagent: DNA ratio of 3:1, according to manufacturer’s protocol. Sixteen hours post-transfection, the media was replaced and cells were incubated for an additional 24-72 hours. Media were harvested at 24-, 48- and 72 hours, clarified by centrifugation at 1,500 RPM for 5 minutes and filtered using a sterile 0.22 µm pore size filter. Clarified lentiviral particles were concentrated by ultracentrifugation at 20.000 RPM for 2 hours at 4° C. The pellet was resuspended in DMEM containing 2% heat inactivated-FBS and stored overnight at 4° C. to allow the pellet to completely dissolve. Next day, samples were aliquoted, snap frozen and stored at -80° C. for downstream assays.

[0225] SARS-CoV-2 pseudotype neutralization and ADE assay: Levels of p24 antigen in the purified SARS-CoV-2 pseudotype suspension were measured by ELISA (Takara). Mouse sera were heat inactivated, pooled and diluted at a linear range of 1:100 to 1:50,000 in complete DMEM. For the neutralization assay, diluted serum samples were pre-incubated overnight at 4° C. with SARS-CoV-2-Spike pseudotyped luciferase lentiviral vector, normalized to 100 ng/mL of p24 antigen. HEK293T cells overexpressing ACE-2 receptor were seeded the day before transduction at a density of 2×10⁵ cells per well in a 96-well plate in complete DMEM. Before infection, 5 µg/mL of polybrene was added to each well. Neutralized serum samples were then added to the wells and the cells were incubated for an additional 48 hours at 37° C. and 5% CO₂ atmosphere. Following incubation, cells were lysed using 40 µL of Luciferase Cell Culture Lysis 5x Reagent per well (Promega). Luciferase activity was quantified using 100 µL of Luciferase Assay Reagent (Promega) as a substrate. Relative luciferase units (RLU) were measured using a microplate reader (SpectraMax L, Molecular Devices) at a 570 nm wave length. The percent neutralization titer for each dilution was calculated as follows: NT = [1-(mean luminescence with immune sera/mean luminescence without immune sera)] × 100. The titers that gave 90% neutralization (NT90) were calculated by determining the linear slope of the graph plotting NT versus serum dilution by using the next higher and lower NT. In all the experiments RLU in uninfected cells was measured and was always between 50 and 90.

[0226] For the ADE assay, THP1 cells were seeded at a confluency of 2×10⁸ cells/mL in a 96 well plate and co-incubated for 48 hours with serum samples diluted at 1:5,000 or 1:50,000 in the presence of SARS-CoV-2-Spike pseudotyped or VSV-G luciferase lentiviral vector, normalized to 100 ng/mL of p24 antigen. Following incubation, cells were lysed using 100 µL of ONE-Glo Luciferase Assay System per well (Promega). RLU were measured as above.

[0227] SARS-CoV-2 focus reduction neutralization test (FRNT): HeLa-ACE2 cells were seeded in 12 µL complete DMEM at a density of 2×10³ cells per well. In a dilution plate, pooled mouse serum was diluted in series with a final volume of 12.5 µL. Then 12.5 µL of SARS-CoV-2 virus was added to the dilution plate at a concentration of 1.2×10⁴ pfu/m L.

[0228] After 1 hour incubation, the media remaining on the 384-well plate was removed and 25 µL of the virus/serum mixture was added to the 384-well plate. The plate was incubated for 20 hours after which the plate was fixed for 1 hour. Each well was then washed three times with 100 µL of 1xPBS 0.05% tween. 12.5 µL of human polyclonal sera diluted 1:500 in Perm/Wash buffer (BD Biosciences 554723) were added to each well in the plate and incubated at room temperature (RT) for 2 hours. The plate was washed three times and peroxidase goat anti-human Fab (Jackson Scientific) was diluted 1:200 in Perm/Wash buffer then added to the plate and incubated at RT for 2 hours. The plate was then washed three times and 12.5 µL of Perm/Wash buffer was added to the plate then incubated at RT for 5 minutes. The Perm/Wash buffer was removed and TrueBlue peroxidase substrate was immediately added (Sera Care 5510-0030). Sera were tested in triplicate wells. Normal human plasma was used as negative controls for serum screening.

[0229] SARS-CoV-2 convalescent plasma samples: COH Institutional Biosafety Committee Protocol 20004 approved the use of SARS-CoV-2 convalescent plasma. Anonymized plasma samples of SARS-CoV-2 convalescent individuals (N=19) were obtained from the University of California, San Diego. Individuals were confirmed to be infected in the previous three to ten weeks by PCR and lateral flow assay. All individuals were symptomatic with mild to moderate-severe symptoms. Serum samples (DS-626-G and DS-626-N, Seracare) purchased before SARS-CoV-2 pandemic were used as a negative control. SARS-CoV-2-specific binding antibodies in plasma samples were measured as described above. Cross-adsorbed goat anti-human IgG (H+L) secondary antibody (A18811, Invitrogen) was used at a dilution of 1:3,000.

[0230] T cell analysis: Spleens were harvested and dissociated using a cell mesh following which blood cells were removed using RBC Lysis Buffer (BioLegend). 2.5×10⁶ splenocytes were stimulated with S or N peptide libraries (GenScript, 15mers with 11aa overlap, 1 µg/ml), 0.1% DMSO, or phorbol myristate acetate (PMA)-ionomycin (BD Biosciences) for 1.5 hours at 37° C. Anti-mouse CD28 and CD49d antibodies (1 µg/ml; BioLegend) were added as co-stimulation. Brefeldin A (3 µg/ml; eBioscience) was added, and the cells were incubated for additional 16 hours at 37° C. Cells were fixed using Cytofix buffer (BD Biosciences) and surface staining was performed using fluorescein isothiocyanate (FITC)-conjugated anti-mouse CD3 (Clone 17A2, 555274, BD), BV650 anti-mouse CD8a (Clone 53-6.7, 563234, BD). Following cell permeabilization using Cytoperm buffer (BD Biosciences), ICS was performed using allophycocyanin (APC)-conjugated anti-mouse IFN-γ (Clone XMG1.2, 554413, BD), phycoerythrin (PE)-conjugated anti-mouse TNF-α (Clone MP6-XT22, 554419, BD), and PE-CF594 anti-mouse IL-2 (BD Biosciences (Clone JES6-5H4, 562483, BD). In experiments testing double recombinants SARS-CoV2 vectors IL-2 antibody was not included and PE-CF594 anti-mouse IL-4 (clone 11B11, 562450, BD) and BV421 rat anti mouse IL-10 (clone JES5-16E3, 563276, BD) were added. Events were acquired using a BD FACSCelesta flow cytometer (2×10⁵ cells/tube). Analysis was performed using FlowJo. Antigen specific T cells were identified by gating on size (FSC vs SSC), doublet negative (FSC-H vs FSC-A), CD3+, CD8+/CD4+. Cytokine positive responses are presented after subtraction of the background response detected in the corresponding unstimulated sample (media added with Brefeldin A one hour after beginning of mock stimulation) of each individual mouse sample. Polyfunctional T-cells analysis was performed by applying FlowJo Boolean combination gating.

[0231] Cytokine ELISA: Splenocytes (1×10⁶) from immunized mice were incubated in v-bottom wells in the presence of 2 µg/ml S or N peptide pools, or without stimulus in a volume of 200 µl. 48 hours later, plates were centrifuged 2000 RPM for 10 minutes and cell supernatant was collected and stored at -80° C. Mouse TNF-alpha (MTA00B), Quantikine ELISA kit (R&D systems) was used according to manufacturer’s recommendations.

[0232] IFNγ ELISpot: T-cell detection by IFNγ ELISpot assay was performed according to the manufacturer’s instructions (3321-2A, Mabtech). ELISpot PVDF plates (MSIPS4W10, Millipore) were pre-activated with ethanol and coated with IFNγ-coating antibody. Splenocytes (2×10⁵ peptide-stimulated, 2X10⁴ PMA/lonomycin-stimulated) were added to duplicate wells and incubated overnight with 2 µg/mL peptides. Stimuli included S and N peptide libraries; S1 subunit peptide pools covering peptides 1-86 (pool 1S1) and 87-168 (pool 2S1) of the S library; S2 subunit peptide pool that included peptides 169-316 of the S library; and peptide N26 (MKDLSPRWYFYYLGT) of the N peptide library. After 24 hours, cells were removed, and IFNγ-detection antibody followed by streptavidin-ALP were added. Spots were developed using BCIP/NBT-plus (3650-10, Mabtech) and analyzed using AID ELISpot reader with AID ELISpot 5.0 iSpot software.

[0233] Statistics: Statistical evaluation was pursued using GraphPad Prism (v8.3.0). For evaluation of differences in sMVA and wtMVA plaque area in BHK-21 and CEF cells and differences in sMVA and wtMVA host cell range, one-way ANOVA followed by Tukey’s and Dunnet’s multiple comparison tests were used, respectively. For sMVA and wtMVA growth kinetic analysis, mixed-effects model with the Geisser-Greenhouse correction, followed by Tukey’s multiple comparisons test were applied. For ELISAs, one-way ANOVA and Tukey’s multiple comparison tests were used to calculate differences in endpoint titers and group means between groups. For IgG2a/IgG1 ratio analysis, one-way ANOVA with Dunnett’s multiple comparison test was used to compare the IgG2a/IgG1 ratio measured in each group to a ratio of 1. Pearson correlation analysis was performed to calculate the correlation coefficient r and its significance. For T cell response analysis, one-way ANOVA followed by Dunnett’s multiple comparisons test with a single pooled variance was used to compare the mean of each group. For ELISpot analysis, two-way ANOVA with Dunnett’s multiple comparison test was applied.

### Example 1: Construction of sMVA

[0234] To develop the three-plasmid system of the sMVA vaccine platform, three unique synthetic sub-genomic MVA fragments (sMVA F1-F3) were designed based on the MVA genome sequence published by Antoine et al.⁴, which is about 178 kbp in length and contains about 9.6 kbp inverted terminal repeats (ITRs) (FIG. 1A). The three fragments were designed as follows: sMVA F1 comprises about 60 kbp of the left part of the MVA genome, including the left ITR sequences; sMVA F2 contains about 60 kbp of the central part of the MVA genome; and sMVA F3 contains about 60 kbp of the right part of the MVA genome, including the right ITR sequences (FIG. 1B). sMVA F1 and F2 as well as sMVA F2 and F3 were designed to share about 3kb overlapping homologous sequences to promote recombination of the three sMVA fragments (FIG. 1B). In addition, a duplex copy of the 165-nucleotide long MVA terminal hairpin loop (HL) flanked by concatemeric resolution (CR) sequences was added to both ends of each of the three sMVA fragments (FIG. 1C). Such CR/HL/CR sequence arrangements are formed at the genomic junctions in poxvirus DNA replication intermediates and essential for genome resolution and packaging²⁷⁻³¹. When circular DNA plasmids containing these CR/HL/CR sequence arrangements are transfected into helper virus-infected cells they spontaneously resolve into linear minichromosomes with intact terminal HL sequences^{28,29,32}. The three sMVA fragments designed as shown in FIGS. 1B-1C, when co-transfected as circular DNA plasmids into helper virus infected cells, can resolve into linear minichromosomes, recombine with each other via the shared homologous sequences, and are ultimately packaged as full-length MVA genomes. All three sMVA fragments were cloned in E. coli as bacterial artificial chromosome (BAC) clones.

[0235] Using a previously employed procedure to rescue MVA from a BAC^{8,9,33}, sMVA virus was reconstituted with Fowl pox (FPV) as a helper virus upon co-transfection of the three DNA plasmids into BHK-21 cells (FIG. 1D), which are non-permissive for FPV³⁴. Two different FPV strains (HP1.441 and TROVAC)^{35,36} were used to promote sMVA virus reconstitution (FIG. 2A). The purified sMVA virus was produced following virus propagation in CEF, which are commonly used for MVA vaccine production. The virus titers achieved with reconstituted sMVA virus were similar to virus titers achieved with “wild-type” MVA (wtMVA) (Table 1).

| | | |
|---|---|---|
| Construct | Insert (insertion site) | Titer* |
| sMVAhp | None | 6.8×10⁹PFU/ml |
| sMVA tv1 | None | 4.1×10⁹ PFU/ml |
| sMVAtv2 | None | 2.3×10⁹PFU/ml |
| wtMVA | None | 4.10×10⁹PFU/ml |
| sMVA-Stv | Spike(Del3) | 4.3×10⁹PFU/ml |
| sMVA-N tv | Nucleocapsid (Del3) | 1.0×10¹⁰ PFU/ml |
| sMVA-S/N hp | Spike (G1L), Nucleocapsid | 8.8×10⁹ PFU/ml |
| sMVA-N/S hp | Nucleocapsid (Del2), Spike (Del3) | 2.3×10⁹ PFU/ml |
| sMVA-S/Ntv | Spike(G1L), Nucleocapsid (Del3) | 8.8×10⁹PFU/ml |
| sMVA-N/S tv | Nucleocapsid (Del2), Spike (Del3) | 8.4×10⁹ PFU/ml |

*Stocks were produced on CEF following infection (MOI 0.02) of 30×15 cm dishes

### Example 2: In Vitro Characterization of sMVA

[0236] To characterize the viral DNA of sMVA, DNA extracts from sMVA and wtMVA-infected CEF were compared for several MVA genome positions by PCR.¹⁵ Similar PCR results were obtained with sMVA and wtMVA for all evaluated genome positions (FIG. 1E), including the F1/F2 and F2/F3 recombination sites, indicating efficient recombination of the three sMVA fragments. Additional PCR analysis indicated the absence of any BAC vector sequences in sMVA viral DNA (FIG. 1E), suggesting spontaneous and efficient removal of the bacterial vector elements upon sMVA virus reconstitution. Comparison of viral DNA from purified sMVA and wtMVA virus by restriction enzyme digestion revealed similar genome pattern between sMVA and wtMVA (FIG. 1F). Sequencing analysis of the sMVA viral DNA confirmed the MVA genome sequence at several positions, including the F1/F2 and F2/F3 recombination sites. Furthermore, whole genome sequencing of one of the sMVA virus isolates reconstituted with FPV TROVAC confirmed the assembly of the reference MVA genome sequence and absence of vector-specific sequences in viral DNA originating from the reconstituted sMVA virus.

[0237] To characterize the replication properties of sMVA, growth kinetics of sMVA and wtMVA were compared on BHK-21 and CEF cells, two cell types known to support productive MVA replication⁶. This analysis revealed similar growth kinetics of sMVA and wtMVA on both BHK-21 and CEF cells (FIG. 2B). In addition, similar areas of viral foci were determined in BHK-21 and CEF cell monolayers infected with sMVA or wtMVA (FIG. 2C), suggesting similar capacity of sMVA and wtMVA to spread in MVA permissive cells. Compared to the productive replication of sMVA and wtMVA in BHK-21 and CEF cells⁶, only limited virus production was observed with sMVA or wtMVA following infection of various human cell lines (FIG. 2D). These results are consistent with the severely restricted replication properties of MVA and show that the sMVA virus can efficiently propagate in BHK-21 and CEF cells, while it is unable to efficiently propagate in human cells.

### Example 3: In Vivo Immunogenicity of sMVA

[0238] To characterize sMVA in vivo, the immunogenicity of sMVA and wtMVA was compared in C57BL/6 mice following two immunizations at high or low dose. MVA-specific binding antibodies stimulated by sMVA and wtMVA after the first and second immunization were comparable (FIGS. 3A, 4A). While the antibody levels in the high dose vaccine groups exceeded those of the low dose vaccine groups after the first immunization, similar antibody levels in the high and low dose vaccine groups were observed after the second immunization. In addition, no significant differences were detected in the levels of MVA-specific NAb responses induced by sMVA and wtMVA after the second immunization (FIGS. 3B, 4B). MVA-specific T cell responses determined after the booster immunization by ex vivo antigen stimulation using immunodominant peptides³⁵ revealed similar MVA-specific T cell levels in mice receiving sMVA or wtMVA (FIGS. 3C-3D and 4C-4D). These results indicate that the sMVA virus has a similar capacity as wtMVA in inducing MVA-specific humoral and cellular immunity in mice.

### Example 4: Construction of sMVA SARS-CoV-2 Vaccine Vectors

[0239] Using highly efficient BAC recombination techniques in E. coli, full-length SARS-CoV-2 S and N antigen sequences were inserted into commonly used MVA insertions sites located at different positions within the three sMVA fragments. Combinations of modified and unmodified sMVA fragments were subsequently co-transfected into FPV-infected BHK-21 cells to reconstitute sMVA SARS-CoV-2 (sMVA-CoV2) vectors expressing the S and N antigen sequences alone or combined (FIGS. 5A and 5B). In the single recombinant vectors encoding S or N alone, termed sMVA-S and sMVA-N, respectively, the antigen sequences were inserted into the Deletion (Del3) site (FIGS. 1B and 5B)⁵. In the double recombinant vectors encoding both S and N, termed sMVA-N/S and sMVA-S/N, the antigen sequences were inserted into Del3 and the Deletion 2 (Del2) site (sMVA-N/S), or they were inserted into Del3 and the intergenic region between 069R and 070L (IGR69/70) (sMVA-S/N) (FIGS. 1B and 5B)^{5,38}. All antigen sequences were inserted into the sMVA-CoV2 vectors together with mH5 promoter to promote antigen expression during early and late phase of MVA replication^{39,40}. sMVA-CoV-2 vaccine vectors were reconstituted with FPV strain HP1.441 or TROVAC. The purified virus of the sMVA-CoV2 vectors produced using CEF reached titers that were similar to those achieved with sMVA or wtMVA (Table 1). PCR and sequencing analysis of the Del2, Del3, and IGR69/70 MVA insertion sites confirmed the integrity and insertion of the SARS-CoV-2 antigen sequences in all sMVA-CoV2 vaccine vectors (FIG. 5C). Moreover, whole-genome sequencing of all double-recombinant sMVA-CoV2 vaccine vectors-reconstituted either with FPV strain TROVAC or HP1.441-verified the reference sequences of these vaccine constructs deposited in NCBI and confirmed the SARS-CoV-2 antigen sequences at the insertion sites, the identity of the MVA genome, and removal of the BAC vector sequences.

### Example 5: In Vitro Characterization of sMVA-CoV2 Vaccine Vectors

[0240] To characterize S and N antigen expression by the sMVA-CoV2 vectors, BHK-21 cells infected with the sMVA-CoV2 vectors were evaluated by Immunoblot using S and N-specific antibodies. This analysis confirmed the expression of the S or N antigen alone by the single recombinant vaccine vectors sMVA-S and sMVA-N, while the expression of both the S and the N antigen was confirmed for the double recombinant vectors sMVA-N/S and sMVA-S/N (FIG. 5D).

[0241] Further characterization of the antigen expression by the sMVA-CoV2 vectors in HeLa cells using cell surface and intracellular flow cytometry (FC) staining confirmed single and dual S and N antigen expression by the single and double recombinant vaccine vectors. Staining with S-specific antibodies revealed abundant cell surface and intracellular antigen expression by all vectors encoding the S antigen (sMVA-S, sMVA-N/S, sMVA-S/N) (FIG. 5E). In contrast, staining with anti-N antibody revealed predominantly intracellular antigen expression by all vectors encoding the N antigen (sMVA-N, sMVA-N/S, sMVA-S/N) (FIG. 5E), although cell surface staining was also observed to a minor extent. S and N antigen expression by the sMVA-CoV2 vectors was also investigated by immunofluorescence. This analysis confirmed co-expression of the S and N antigens by the double recombinant vaccine vectors and indicated efficient cell surface and intracellular expression of the S antigen, whereas the expression of the N antigen was predominantly observed intracellular (FIGS. 6A-6C). Furthermore, immunofluorescence imaging in addition to intracellular flow cytometry by dual antibody staining demonstrated co-expression of the S and N antigens within the same cell by the double recombinant sMVA-CoV2 vectors (FIGS. 6A-6D). These results demonstrate efficient antigen expression by the single and double recombinant sMVA-CoV2 vectors.

### Example 6: In Vivo Immunogenicity of sMVA-CoV2 Vectors

[0242] To determine the immunogenicity of the sMVA-vectored S and N antigens alone or combined, SARS-CoV-2-specific humoral and cellular immune responses were evaluated in Balb/c mice by two immunizations with the single or double recombinant vaccine vectors. High-titer antigen-specific binding antibodies were detected in all vaccine groups after the first immunization, and an increase in these responses was observed after the booster immunization (FIGS. 7A-7B and 8A-8B). While the single recombinant vectors induced binding antibodies only against the S or N antigen, the double recombinant vectors induced binding antibodies against both the S and N antigens. In addition, all sMVA-CoV2 vectors encoding the S antigen (sMVA-S, sMVA-S/N, sMVA-N/S) stimulated high-titer binding antibodies against the S receptor binding domain (RBD), which is considered the primary target of NAb^{22,24}. Antigen-specific binding antibody titers between the single and double recombinant vaccine groups were comparable. Notably, SARS-CoV-2 antigen-specific binding antibody responses stimulated by the sMVA-CoV2 vaccine vectors in mice exceeded SARS-CoV-2 S-, RBD-, and N-specific binding antibody responses measured in human convalescent immune sera (FIGS. 7A-7B, and 9). Similar binding antibody responses to those induced by sMVA-CoV2 vectors in Balb/c mice were elicited by the vaccine vectors in C57BL/6 mice (FIG. 10). Analysis of the IgG2a/IgG1 isotype ratio of the binding antibodies revealed Th-1-biased immune responses skewed toward IgG2a independently of the investigated vaccine group or antigen (FIGS. 7C and 8C).

[0243] Potent SARS-CoV-2-specific NAb responses as assayed using pseudovirus were detected after the first immunization in all vaccine groups receiving the vectors encoding the S antigen (sMVA-S, sMVA-S/N, sMVA-N/S), and these NAb responses increased after the booster immunization (FIGS. 7D-7E and 8D-8E). Similar potent NAb responses as measured using pseudovirus were observed in the vaccine groups using infectious SARS-CoV-2 virus (FIGS. 7F-7G and 8F-8G). The immune sera for potential antibody-dependent enhancement of infection (ADE) were evaluated using THP-1 monocytes. These cells do not express the ACE2 receptor, but express Fcy receptor II, which is considered the predominant mediator of ADE in SARS-CoV infection⁴¹. THP-1 monocyte infection by SARS-CoV-2 pseudovirus was not promoted by the immune sera of any of the vaccine groups even at sub-neutralizing antibody concentrations (FIG. 11), suggesting absence of Fc-mediated ADE by antibodies induced by the vaccine vectors.

[0244] SARS-CoV-2-specific T cells evaluated after the second immunization by ex vivo antigen stimulation revealed both S- and N-specific T cell responses in the vaccine groups receiving the double recombinant vectors sMVA-S/N and sMVA-N/S. In contrast, mice receiving the single recombinant vectors sMVA-N or sMVA-S developed T cell responses only against either the N or S antigen (FIGS. 12A-12D, 13, and 14). High levels of cytokine-secreting (IFNy, TNFα and IL-4) S-specific CD8+ T cells were measured in all vaccine groups immunized with the S-encoding sMVA-CoV2 vectors (FIG. 12A). S-specific CD4+ T-cells mostly produced Th1 cytokines (IFNγ and TNFα), while production of Th2 cytokines (IL-4 and IL-10) did not increase following antigen stimulation (FIGS. 12C, 14), indicating a Th1-biased response. While activated N-specific CD8+ T cells were not detected at significant frequency (FIG. 12B), N-specific IFNγ and to some degree TNFα-secreting CD4+ T cells were measured in all animals vaccinated with the single and double recombinant vectors encoding N (FIGS. 12D and 14). No significant differences were observed in the T cell levels of the single and double recombinant vaccine groups.

[0245] Stimulation of SARS-CoV-2-specific immune responses by both the S and N antigens was also evaluated in mice by co-immunization using the single recombinant vectors sMVA-S and sMVA-N at different doses. This study revealed similar SARS-CoV-2 antigen-specific humoral and cellular immune responses in vaccine groups receiving sMVA-S and sMVA-N alone or in combination (FIGS. 15 and 16). Altogether these results indicate that the sMVA-vectored S and N antigens when expressed alone or combined using a single vector or two separate vectors can stimulate potent SARS-CoV-2-specific humoral and cellular immune responses in mice.

### Example 7: In Vivo Immunogenicity of COH04S1 in Mice

[0246] Mice immunized with sMVA vaccine, COH04S1, either once or twice, demonstrated high titers of binding antibodies, neutralizing antibodies and T cell reactivity. These results suggest that COH04S1 is highly immunogenic in mice. See Table 2 below. NT50/90 is the dilution of the (antibody-containing) serum still showing 50/90% neutralization of infection. In combination with extensive prior safety and clinical experience of MVA and as a platform to address future variants of coronaviruses, the vaccine disclosed herein has potentially significant clinical use.

TABLE 2

Summary of mouse immunogenicity elicited by COH04S1

| | | | |
|---|---|---|---|
| 1 | Total SARS-CoV-2 binding antibodies | Endpoint titer: approx. 10⁵ | Endpoint titer: approx. 10⁵ |
| 2.1 | T-cell immune response | Both for Spike and Nucleocapsid: CD4⁺ and CD8⁺ T cells show Th1 polarization (indicative of cell-mediated immunity against pathogens), predominantly releasing TNFα and IFNγ | |
| 2.2 | | | |
| 3 | Neutralizing antibodies | NT50*: approx. 10³ | NT50: approx. 10⁴ |
| | | NT90:2.2-2.5*10² | NT90: 3 - 4*10³ |
| 4 | Antibody-dependent enhancement of infection | None found | None found |

[0247] FIG. 18 demonstrates high titers of total binding antibodies directed against Spike (S), Receptor Binding Domain (RBD) and Nucleocapsid (N) antigen shown after first (top panels) and second (bottom panels) immunization with C46 expressing both S and N antigens. The antibody titers compared favorably with antibody titers in convalescent human sera (dotted lines). S-specific antibody responses effectively bound to mutated S (D614G) antigen (data not shown).

[0248] FIG. 19 demonstrates antigen-specific CD4+ (left side) and CD8+ (right side) T cell responses in mice vaccinated with dual antigen construct sMVA-N/S (C35) as well as single- and no-antigen and control. IFNγ and TNFα cytokine production demonstrates robust anti-Spike Th1 cytokine response. Absence of response to IL-4 (and IL-10, data not shown) points to lack of Th2 response.

[0249] FIG. 20 shows the ratios of IGg2a to IgG1 and IFNγ to IL-4 secretion, demonstrating that vaccination with sMVA-N/S (C35) resulted predominantly in a humoral and cellular Th1 response (which is instrumental in cell-mediated immunity against pathogens), not a Th2 response. Vaccination with Spike antigen mixed with Alum adjuvant (prototype adjuvant for induction of a Th2 response) is shown as control on the right in each panel.

[0250] FIG. 21 shows antibodies in mouse serum after one (“post-prime”) or two (“post-boost”) immunizations with dual-antigen COH04S1, single-antigen and empty vectors as well as mock control demonstrate effective development of neutralizing antibodies when using vectors expressing the Spike antigen. sMVA vaccine expressing only Spike antigen is shown in blue (sMVA-S), sMVA vaccine expressing only Nucleocapsid antigen is shown in red (sMVA-N), sMVA vaccine expressing both Spike (S) and Nucleocapsid (N) antigens is shown in green (COH04S1), sMVA vector without SARS-CoV-2 insert is shown in brown (sMVA), and the mock vaccination is shown in navy (mock). Neutralizing antibodies were measured using live SARS-CoV-2 to infect HeLa-Ace2 cells.

[0251] FIG. 22 shows that COH04S1 elicited potent SARS-CoV-2-specific neutralizing antibodies (Nab) in mice (using live SARS-CoV-2 virus). NAbs effectively blocked infection of SARS-CoV-2 infectious virus. The NAb tittered 1-2 orders of magnitude above titers that are considered protective for SARS-CoV-2 infection.

[0252] FIG. 23 shows that C46 did not demonstrate evidence of characteristic synonymous with antibody-dependent enhancement (ADE) of infection. The left panel shows HEK cells expressing human ACE2 protein. Pseudovirus infection was successfully prevented by antibodies generated after infection of mice with C46 as well as a single S-expressing vector. No inhibition of infection by controls and no ADE (this would show as RLU units above upper dotted line) by serum antibodies from mice treated with any vector was observed. This panel was the positive control showing that the vaccine was working. The middle panel shows the THP-1 monocytic cell line, not expressing ACE2 receptor (and therefore not capable of being infected by SARS-CoV-2 virus) but expressing Fc receptors (which are suspected in causing ADE). No infection and no ADE were observed in this experiment (no increase above the dotted line). The right panel shows THP-1 cells, positive control infection with VSV vector. No reduction of this infection in the presence of antibodies from treated mice, and no ADE effect observed in the presence of these antibodies either (RLU did not increase above the upper dotted line). RLU represents relative luciferase units, a measure of the degree of infection in this system.

[0253] FIG. 24 shows that COH04S1 induced strong humoral and cellular immune responses in mice following intraperitoneal (IP) and intranasal (IN) vaccinations.

[0254] To further assess the immunogenicity of the sMVA-vectored N antigen, the double recombinant vaccine vector sMVA-N/S was evaluated for antigen-specific T-cell stimulation in transgenic C57BL/6 mice expressing the human leukocyte antigen (HLA)-B*0702 (B7). This HLA type has been recently described to present immunodominant N-specific peptides that are frequently recognized in SARS-CoV-2-infected patients. C57BL/6 B7 mice immunized with sMVA-N/S developed high-frequency N-specific CD8+ T cells secreting IFNγ and TNFα that reached over 2-3% of the total CD8+ T-cell population (FIG. 25A). S-specific CD8+ cells secreting IFNγ were also detected at significant levels in sMVA-N/S-immunized C57BL/6 B7 mice, albeit at lower frequency compared to the N-specific T-cell responses (FIG. 25B). N- or S-specific CD8+ T cells secreting IL-4 were not observed in significant levels in sMVA-N/S-immunized animals. Notably, sMVA-N/S-stimulated CD8+ T cells to both the N and S antigens in C57BL/6 B7 mice were largely polyfunctional, with more than half of the N-specific CD8+ T cells secreting IFNγ and TNFα combined (FIGS. 25C and 25D). Further analysis by IFNγ ELISPOT revealed that the S-specific T-cell responses induced by sMVA-N/S in C57BL/6 B7 mice were mostly directed toward epitopes of the S2 domain (FIG. 26). In addition, a significant response was measured in sMVA-N/S-immunized B7 mice following stimulation with an HLA-B*0702 immunodominant N-specific peptide epitope (SPRWYFYYL) that has been shown recently to be recognized by a high proportion of people recovering from COVID-19 disease (FIG. 26). FIG. 26 shows that a major component of the response to Spike antigen is to the S2 domain. The N library is well recognized as it is in humans. A significant component was identified as a previously described N peptide: N26 MKDLSPRWYFYYLGT. Bold and underlined is the epitope that is described in humans: Peng, Y., Mentzer, A.J., Liu, G. et al., Broad and strong memory CD4+ and CD8+ T cells induced by SARS-CoV-2 in UK convalescent individuals following COVID-19. Nat Immunol (2020). https://doi.org/10.1038/s41590-020-0782-6. These results demonstrate that both the sMVA-vectored N and S antigens are immunogenic in HLA B*0702 transgenic mice, while the CD8+ T-cell response targeting N appears to be immunodominant.

[0255] FIG. 27 shows that aged mice immunized with COH04S1 clinical isolate developed comparable immune responses to young mice following prime-boost immunization.

[0256] FIG. 28 shows the immunogenicity of COH04S1 clinical isolate. COH04S1 shows comparable immunogenicity between sexes in Balb/C mice and demonstrates Th1 immunity compared to S/N/Alum to all antigens.

### Example 8: In Vivo Immunogenicity of COH04S1 in Hamsters

[0257] COH04S1 immunogenicity and protection study was carried out using 6-8 weeks old golden Syrian hamsters (Mesocricetus auratus). The aim of the study was to test immunogenicity and protective efficacy of SARS-CoV-2 vaccine candidates based on the City of Hope (COH) synthetic MVA platform in golden Syrian hamsters.

[0258] The Syrian Golden Hamster was chosen as a small animal model due to the greater resemblance of compared model COVID-19 disease symptoms in this to human disease and in comparison to other small animal models, allowing for an assessment of the impact of the various vaccines including COH04S1 on preventatives and reduction in disease severity.

[0259] A total of 90 golden Syrian hamsters, evaluated in 15 groups described in Table 3 were used to evaluate synthetic SARS-CoV-2 sMVA vaccine candidates via the intramuscular and intranasal routes. In addition to COH04S1, sMVA constructs expressing wild-type or 2P S (Spike) and N (Nucleocapsid) or S alone were tested. This analysis included parental sMVA-N/S vector C35 co-expressing wild-type forms of S and N antigens (FIG. 5), clinical isolate COH04S1 (C35/F4/B1) derived by double plaque purification process from C35 (FIGS. 17 and 57), another double plaque-purified isolate (C35/F4/D5) derived from C35; a double plaque-purified isolate (C46/C3/F10) derived from sMVA-S/N vector C46 (FIG. 5), an sMVA vector co-expressing N together with a prefusion stabilized form of the S antigen with 2P alteration (C79), and sMVA-S vector C15 expressing only wild-type S. Control groups were sMVA empty vector and mock-immunized animals. Animals were immunized either intramuscularly (IM) or intranasally (IN) with 1×10⁸ pfu of sMVA recombinants.

TABLE 3

Study Groups/Experimental Design

| Gr | N | Treatment | | | Challenge (IN) | Weight and Clin. Obs. | Blood Collection | Termination |
|---|---|---|---|---|---|---|---|---|
| | | Material(Dose) | Route | Days | | | | |
| 1 | 6 (3F/3M) | sMVA (1e8) | IM | 0.28 | Day 42 SARS-CoV-2 50µL/n ostril | Daily weights and BID observation during challenge period | Up to 5 | Day 52 Nasal wash BAL Collect lungs, trachea, nasal turbinates, brain, kidney,GI tract |
| 2 | 6 (3F/3M) | C79 (S2P/N) (1e8) | IM | | | | | |
| 3 | 6 (3F/3M) | COH04S1 (1e8) | IM | | | | | |
| 4 | 6 (3F/3M) | C35/F4/D5 (S/N) (1e8) | IM | | | | | |
| 5 | 6 (3F/3M) | C46/C3/F10 (S/N) (1e8) | IM | | | | | |
| 6 | 6 (3F/3M) | C15 (S) (1e8) | IM | | | | | |
| 7 | 6 (3F/3M) | C35 (S/N) (1e8) | IM | | | | | |
| 8 | 6 (3F/3M) | sMVA (1e8) | IN | | | | | |
| 9 | 6 (3F/3M) | C79 (S2P/N) (1e8) | IN | | | | | |
| 10 | 6 (3F/3M) | COH04S1 (1e8) | IN | | | | | |
| 11 | 6 (3F/3M) | C35/F4/D5 (S/N) (1e8) | IN | | | | | |
| 12 | 6 (3F/3M) | C46/C3/F10 (S/N) (1e8) | IN | | | | | |
| 13 | 6 (3F/3M) | C15(S) (1e8) | IN | | | | | |
| 14 | 6 (3F/3M) | C35 (S/N) (1e8) | IN | | | | | |
| 15 | 6 (3F/3M) | Mock | N/A | N/A | | | | |

[0260] Vaccine constructs were administered to the animals via the indicated route at the specified dose on Day 0 followed by boost administration on day 28. Serum was evaluated for binding antibodies and SARS-CoV-2 authentic virus neutralization at the timepoints indicated (FIG. 29). Six animals per group (3 female and 3 male hamsters) were immunized in a prime-boost schedule with 1×10⁸ pfu of COH04S1 or 1×10⁸ pfu of sMVA empty control vector via the intramuscular or the intranasal routes.

[0261] Post-immunization analyses included detection of Spike- and Nucleocapsid-specific binding antibodies and quantification of neutralizing antibodies by both live SARS-CoV-2 virus and Spike-pseudovirus.

[0262] Two weeks post-boost, animals were challenged with 6×10⁴ pfu of SARS-CoV-2, Isolate USA-WA1/2020 (NR-52281, BEI Resources). At 10 days post challenge, the animals were euthanized, and the organs were collected for determination of virus titer, gross pathology and histopathological assessments. Weight loss over time and clinical observations were taken twice daily.

### Humoral Response

[0263] Total IgG binding antibodies to S, RBD and N were measured in hamster serum four weeks post-prime (day 28) and two weeks post-boost (day 42). Binding antibodies were not detected in control animals. In contrast, all sMVA-SARS-CoV-2 immunized animals developed binding antibodies to S, RBD, and N post-prime and titers were increased by a second dose (FIG. 30). Comparable titers were measured in IM- and IN-immunized hamsters.

[0264] Sera collected on days 28 and 42 were evaluated for the presence of neutralizing antibodies (NAb) using a PRNT SARS-CoV-2 assay.

[0265] As shown in Table 4 and FIG. 31, control animals did not develop NAb (IC50 <20). Low titer NAb were detected in few animals post-prime and appeared to be higher after IN immunization although results are not available for all the animals. Post-boost NAb titers increased and ranged between 60 and >4860 (assay upper limit of detection).

TABLE 4

PRNT assay results

| Animal # | Group | Treatment | Route | Day 28 | Day 41 |
|---|---|---|---|---|---|
| | | | | Titer (IC₅₀) | Titer (IC₅₀) |
| 6310 | 1 | sMVA | IM | | <20 |
| 6311 | | | | | <20 |
| 6312 | | | | | <20 |
| 6313 | | | | | <20 |
| 6314 | | | | | <20 |
| 6315 | | | | | <20 |
| 6316 | 2 | S2P/N (C79) 1e8 | IM | | 1620 |
| 6317 | | | | | 540 |
| 6318 | | | | | 180 |
| 6319 | | | | | 60 |
| 6320 | | | | | 540 |
| 6321 | | | | | 180 |
| 6322 | 3 | COH04S1 (C35/F4/B1) 1e8 | IM | | 540 |
| 6323 | | | | | 540 |
| 6324 | | | | | 540 |
| 6325 | | | | | 540 |
| 6326 | | | | | 540 |
| 6327 | | | | | 540 |
| 6328 | 4 | S/N (C35/F4/D5) | IM | | 540 |
| 6329 | | | | | 180 |
| 6330 | | 1e8 | | | 180 |
| 6331 | | | | | 180 |
| 6332 | | | | | 60 |
| 6333 | | | | | 180 |
| 6334 | 5 | S/N (C46/C3/F10) 1e8 | IM | | 180 |
| 6335 | | | | | 180 |
| 6336 | | | | | 180 |
| 6337 | | | | | 180 |
| 6338 | | | | | 180 |
| 6339 | | | | | 60 |
| 6340 | 6 | S (C15) 1e8 | IM | 20 | 180 |
| 6341 | | | | <20 | 180 |
| 6342 | | | | 20 | 540 |
| 6343 | | | | 60 | 540 |
| 6344 | | | | <20 | 540 |
| 6345 | | | | <20 | 180 |
| 6346 | 7 | S/N (C35) 1e8 | IM | <20 | 1620 |
| 6347 | | | | <20 | 180 |
| 6348 | | | | <20 | 540 |
| 6349 | | | | <20 | 180 |
| 6350 | | | | <20 | 60 |
| 6351 | | | | <20 | 540 |
| 6352 | 8 | sMVA | IN | <20 | <20 |
| 6353 | | | | <20 | <20 |
| 6354 | | | | <20 | <20 |
| 6355 | | | | <20 | <20 |
| 6356 | | | | <20 | <20 |
| 6357 | | | | <20 | <20 |
| 6358 | 9 | S2P/N (C79) 1e8 | IN | 60 | 180 |
| 6359 | | | | 180 | 540 |
| 6360 | | | | 60 | 1620 |
| 6361 | | | | 180 | 1620 |
| 6362 | | | | 20 | 1620 |
| 6363 | | | | 180 | 1620 |
| 6364 | 10 | COH04S1 (C35/F4/B1) 1e8 | IN | 180 | 1620 |
| 6365 | | | | 60 | 540 |
| 6366 | | | | 20 | 540 |
| 6367 | | | | <20 | 180 |
| 6368 | | | | <20 | 540 |
| 6369 | | | | <20 | 60 |
| 6370 | 11 | S/N (C35/F4/D5) 1e8 | IN | | 1620 |
| 6371 | | | | | 180 |
| 6372 | | | | | 540 |
| 6373 | | | | | 540 |
| 6374 | | | | | 540 |
| 6375 | | | | | 540 |
| 6376 | 12 | S/N (C46/C3/F10) | IN | | 60 |
| 6377 | | | | | 540 |
| 6378 | | 1e8 | | | 180 |
| 6379 | | | | | 540 |
| 6380 | | | | | 60 |
| 6381 | | | | | 180 |
| 6382 | 13 | S (C15) 1e8 | IN | | 180 |
| 6383 | | | | | 540 |
| 6384 | | | | | 540 |
| 6385 | | | | | 60 |
| 6386 | | | | | 540 |
| 6387 | | | | | 60 |
| 6388 | 14 | S/N (C35) 1e8 | IN | | 180 |
| 6389 | | | | | 180 |
| 6390 | | | | | 1620 |
| 6391 | | | | | 1620 |
| 6392 | | | | | 1620 |
| 6393 | | | | | >4860 |
| 6394 | 15 | Mock | N/A | | <20 |
| 6395 | | | | | <20 |
| 6396 | | | | | <20 |
| 6397 | | | | | <20 |
| 6398 | | | | | <20 |
| 6399 | | | | | <20 |

### Body Weight Analysis

[0266] Hamsters were challenged two weeks post-boost with 6×10⁴ pfu of SARS-CoV-2, Isolate USA-WA1/2020, and the weight changes were measured daily for 10 days. Hamsters immunized IM with sMVA-S/N, N/S, S vaccines showed an initial minor weight loss comparable to control animals. Starting from day 3 post-challenge sMVA- S/N, N/S, S-immunized animals started recovering their weight while control animals kept losing weight. Control animals’ weight dipped at day 7 to a mean value of -15% and started increasing thereafter. Between day 3 post-challenge and the final time-point 10-days post-challenge the difference in weight between sMVA-SARS-S/N, N/S, S and control animals was significant (FIGS. 32 and 33).

[0267] Similar results were obtained with sMVA-S/N, N/S, S-IN immunized animals. sMVA-S/N, N/S, S given intranasally prevented weight loss in challenged animals in comparison to mock-immunized and sMVA IN-immunized hamsters. The difference was significant from day 2 until the end of the study (FIGS. 32 and 33). No difference was observed amongst all tested recombinant vaccines, independently from the route of administration. Additionally, no difference in weight loss was observed between female and male hamsters (FIG. 33).

### Effects of COH04S1

[0268] COH04S1 IM- and IN-immunized animals developed comparable binding antibody titers to S, RBD and N both post-prime and post-boost (FIG. 34). Additionally, analysis of the antibody isotype indicated a Th1-biased response with an IgG2-3/IgG1 ratio strongly shifted toward the Th1 Isotypes IgG2 and IgG3. Six out of six IM-immunized COH04S1 hamsters had high titer NAb with a geometric mean IC50 of 540. COH04S1 IN-immunized animals had titers between 180 and 1620 with a median titer of 540. COH04S1 administered IM or IN protected the animals from weight loss following a sub-lethal challenge with authentic SARS-CoV-2 virus (FIG. 35).

[0269] The lungs, turbinates and nasal wash collected at day 10 post-challenge were analyzed for the presence of SARS-CoV-2 genomes by genomic RNA qPCR (FIG. 36). At day 10 post-challenge, mock-immunized and sMVA-immunized hamsters still had high viral load in lungs, turbinates and in nasal washes. COH04S1 IM- and IN-immunized animals’ samples showed significantly reduced gRNA amounts in lungs, turbinates and in nasal wash with the highest difference measured in lungs indicative of COH04S1-mediated protection.

### Example 9: In Vivo Immunogenicity and Protective Efficacy of COH04S1 in African Green Monkeys

[0270] African green monkeys (AGMs) support a high level of SARS-CoV-2 replication and develop pronounced respiratory disease that can be more substantial than in other NHP species including cynomolgus and rhesus macaques translating to greater comparability to symptoms of COVID-19 presentation in humans.

[0271] In this study, outbred AGMs of different sex and weight (Table 5) were vaccinated with COH04S1 intramuscularly (IM) with one or two doses and vaccine immunogenicity and protective efficacy were evaluated.

TABLE 5

AGM weight and sex distribution across groups

| Group | Study | ID# | Weight (kg) | Sex |
|---|---|---|---|---|
| 1 (Saline Control) | 1 | D4697 | 4.76 | F |
| | | D4649 | 3.02 | F |
| | | D4062 | 3.78 | F |
| | 2 | D4645 | 3.56 | F |
| | | D4756 | 3.45 | F |
| | | D3505 | 6.79 | M |
| 2 (Mock Vaccine, sMVA) | 1 | D4187 | 4.03 | F |
| | | D3783 | 3.31 | F |
| | | D3704 | 3.63 | F |
| | 2 | D4595 | 3.41 | F |
| | | D4079 | 3.73 | F |
| | | D3506 | 6.05 | M |
| 3 (COH04S1) | 1 | C4403 | 4.02 | F |
| | | D4877 | 2.91 | F |
| | | D4407 | 3.69 | F |
| | | D4389 | 3.68 | F |
| | | D4863 | 3.37 | F |
| | | D4732 | 7.23 | M |
| | 2 | D3308 | 3.79 | F |
| | | D4596 | 3.83 | F |
| | | D3808 | 2.95 | F |
| | | D4678 | 3.86 | F |
| | | D4640 | 3.36 | F |
| | | B2749 | 5.63 | M |

[0272] The AGMs received either one (study two) or two (study one) immunizations with 5×10⁸ pfu or 2.5×10⁸ pfu of sMVA recombinants, respectively. Three AGMs in each study received either mock saline immunization or empty sMVA vector as controls. Six AGMs in each study were immunized with COH04S1 in a prime (study 2) or prime-boost (Study 1) setting (FIG. 38). Blood and serum samples were collected at different time-points for the analysis of cellular and humoral immunity. Six weeks post prime (study 2) or six weeks post-boost (study 1) the AGMs were challenged with 1×10⁵ pfu of SARS-CoV-2. The animals were observed, weighed and the temperature was taken daily for the first week and every other day for the following two weeks. On each sampling day, nasal, oral and anal swabs were collected. Broncho alveolar lavages (BAL) were collected on days 2, 4, 7, 10 and 21 post-challenge. At day 7 post-challenge 1 mock animal, 2 sMVA control animals and 3 COH04S1-immunized animals in both studies were sacrificed and organs were collected for virus quantification and histopathology. At day 21 post-challenge the remaining animals in both studies were sacrificed and organs collected for virological and immunological studies.

[0273] Starting from 2 weeks post-prime (study 2) and 2 weeks post-boost (study 1), T cell responses to Spike (S) and Nucleocapsid (N) antigens were evaluated in freshly isolated PBMCs by IFNγ/IL-2/IL-4 ELISPOT (FIGS. 39-41). Prime-only animals tended to have lower S- and N-specific IFNγ T cells levels than prime-boost animals. However, the recall response post-challenge was higher in prime only animals than in prime-boost animals. The COH04S1-imunized AGMs developed robust IFNγ T-cell responses to S and N that were absent in control animals and increased at day 7 post-challenge, indicative of an anamnestic response to the challenge virus (FIG. 39). IL-2 responses followed closely IFNγ responses although at lower levels. IL-4 T cell responses, indicative of a pathologic inflammatory response, were very low or absent in all COH04S1-immunized animals (FIGS. 40-41).

[0274] BAL samples were evaluated for the presence of SARS-CoV-2 challenge virus by genomic RNA (gRNA) quantification and plaque quantification (tissue culture infectious dose 50, TCID50). Differently from sub-genomic RNA (sgRNA) and TCID50 which only measure replicating virus, gRNA is a measure of both input challenge virus and replicating virus and especially at early time points post-challenge can be highly contaminated with input virus. At day 2 post-challenge, both prime and prime-boost COH04S1 animals showed significantly reduced gRNA copies in BAL samples than control animals (FIG. 42). One COH04S1-vaccinated animal in each study had undetectable virus in BAL. At day 4 post-challenge there was a trend to lower gRNA copies in vaccinated animals in comparison to controls but the difference was not significant.

[0275] Viral load in BAL samples taken on days 2, 4, and 7 post-challenge was quantified by plaque assay (FIGS. 43-44). On day 2 post-challenge there was a significant reduction in vial load in samples from animals immunized with COH04S1 in comparison to controls. One animal on study one, and three animals on study 2 had undetectable virus in BAL samples on day 2 post-challenge. By day 7 post-challenge all COH04S1-immunized animals except for an AGM on study 1 had viral load below the lower limit of detection of the assay. In contrast, all control animals in both studies still had measurable virus in the lungs on day 7 post-challenge. These results demonstrate that COH04S1 administered either as one or two injections can rapidly protect AGM lower airways from SARS-CoV-2 virus infection.

### Example 10: Phase I Clinical Trial of COH04S1 for Prevention of COVID-19

[0276] COH04S1 was evaluated in healthy adults in a dose escalation clinical trial (NCT04639466) to identify adverse events and an optimal dose. Safety and tolerability of the COH04S1 vaccine were evaluated at three different dose levels (DLs): 1.0×10⁷ plaque-forming unit (PFU)/dose, 1.0×10⁸ PFU/dose, and 2.5×10⁸ PFU/dose. For each DL, 4-6 open label sentinels were included.

[0277] COH04S1 Phase I clinical trial was performed at 3 dose levels (DL1-3) with 4-6 open-label sentinels at each DL followed by 35 injected healthy research subjects randomized against placebo. DL1 corresponds to 1×10⁷ PFU/dose, same low dose as used in mice. DL2 corresponds to 1×10⁸ PFU/dose, and DL3 corresponds to 2.5×10⁸ PFU/dose. All doses are compatible with large scale production. Prime-boost immunizations were safely given to 16 out of 17 (one DL2 sentinel withdrew from the study after only receiving prime vaccination) sentinels, and COH04S1 was safe and well tolerated in DL1, DL2 and DL3 sentinels. All sentinels tested seroconverted to S and N antigens and developed Th1 T cell responses. All sentinels tested developed neutralizing antibodies.

### Binding Antibodies

[0278] Four DL1 open label sentinels were evaluated for development of IgG binding antibodies to Spike (S), S receptor binding domain (RBD) and Nucleocapsid (N) up to day 120 using ELISA (FIG. 45A). In all DL1 sentinels at all time points, S-specific binding antibodies were measurable and tended to increase post-boost. RBD-specific binding antibodies were not present post-prime in ¾ DL1 sentinels. Post-boost levels were comparable or slightly lower than median levels measured in a pool of 35 SARS-CoV-2 convalescent individuals that had mild-to-severe COVID-19 disease. N-specific binding antibody levels were variable amongst DL1 sentinels. Post-boost N-specific binding antibodies were detectable in all DL1 sentinels post-boost with levels as high as those measured in convalescent individuals.

[0279] Five DL2 sentinels were evaluated for development of IgG binding antibodies to S, RBD and N through day 90 (FIG. 45B). Similar to DL1 sentinels, in all five DL2 sentinels binding antibodies to S developed shortly after the first vaccination with COH04S1 and were boosted by a second dose. RBD-binding antibodies were measured in 4 out of 5 DL2 sentinels post-prime immunization and reached higher titers post-boost comparable to titers measured in convalescent serum. DL2 sentinels developed variable levels of N-specific binding antibodies with 5 out of 5 sentinels showing measurable levels of N-specific IgG by day 56.

[0280] S-, RBD-, and N-specific binding antibodies were evaluated in 6 DL3 sentinels up to day 56 (FIG. 45C). All DL3 sentinels readily developed S-specific binding antibodies post-prime. In 2 out of 6 DL3 sentinels S-specific IgG titers were not boosted by a second dose. In the remaining 4 DL3 sentinels S-IgGs increased after the boost at given day 28. RBD-specific binding antibodies were higher than baseline in 4 out of 6 DL3 sentinels, including one DL3 sentinel that post-prime reached higher titers than those measured in convalescent serum. Post-boost all DL3 sentinels had RBD-specific binding antibodies with titers approaching or comparable to titers measured in convalescent serum. N-specific binding antibodies were diverse amongst DL3 sentinels, although tended to reach higher titers post-prime in comparison to DL1 and DL2 sentinels. By day 42, 6 out of 6 DL3 sentinels had measurable N-specific binding antibodies.

[0281] IgG titers to S, RBD and N in DL1/DL2/DL3 sentinels were compared to titers measured in a group of City of Hope employees who received two doses of EUA vaccine (Pfizer/BioNTech) at day 60 and 90 post prime immunization. Additionally, titers from COH04S1 vaccines were compared to titers measured in a pool of 35 SARS-CoV-2 convalescent individuals that had mild-to-severe COVID-19 disease (FIG. 46). Overall, S-, RBD- and N-specific antibodies induced after two doses of COH04S1 were comparable to those in EUA vaccine recipients and/or convalescent plasma from individuals recovered from mild-to-severe COVID-19 disease. Booster immunization increased titers especially for RBD binding antibodies.

[0282] To address the most recent SARS-CoV-2 variant viruses, DL1/DL2/DL3 sentinel serum samples were evaluated for binding to P.1 Brazilian SARS-CoV-2 variant Spike and compared to binding to Spike from the original SARS-CoV-2 Wuhan strain (FIG. 47). DL1 sentinel serum samples bound less efficiently to P.1 Spike in comparison to Wuhan Spike resulting in lower titers. In contrast, at all timepoints, DL2 and DL3 sentinels had similar titers to P.1 Spike and Wuhan Spike with most DL3 sentinels having comparable titers or higher titers to P.1 Spike than Wuhan Spike at day 56.

### Neutralizing Antibodies

[0283] Neutralizing antibodies against the D614G variant of the ancestral Wuhan Spike amino acid sequence and against the widespread UK (B.1.1.7), the Republic of South African (RSA, B.1.351), and Brazilian (BRA, P.1) VOC were measured using an in vitro microneutralization assay and lentivirus-based pseudoviruses of each strain (FIG. 48). All Spike sequences included the D614G mutation and had a truncation of the last 19 amino acids at the C-terminus (KFDEDDSEPVLKGVKLHYT).

[0284] In concordance with the timing of development of RBD-specific binding antibodies, neutralizing antibodies against the three strains were low or not measurable post-prime in DL1 sentinels with the exception of one DL1 sentinel who immediately developed NT50 between 50 and 100 for the reference strain, UK and Brazilian VOC at day 14 post-prime. A significant increase in titers was observed in the other 3 DL1 sentinels post-boost reaching NT50 titers up to 150. All three strains were neutralized with variable potency and titers were stable through day 56. At days 90 and 120, all DL1 sentinels had measurable neutralizing antibodies for at least one viral strain (ancestral Wuhan strain or VOC).

[0285] Of the 5 DL2 sentinels tested for neutralizing antibodies against the reference strain and the UK, RSA, and BRA VOC, 4 developed early neutralizing antibodies post-prime reaching peak NT50 titers up to 300. Overall, post-boost titers were more elevated than in DL1 sentinels with d56 NT50 geometric mean titers (GMT) titers of 212, 169, 64 and 119 against D614G (Wuhan), UK, RSA, and BRA VOC respectively (FIG. 49).

[0286] DL3 sentinels developed early high titer neutralizing antibodies in 2 out of 6 volunteers. The other 4 DL3 sentinels had low titer neutralizing antibodies post-prime which increased after a second dose of the vaccine. Overall, in DL3 sentinels titers of neutralizing antibodies to the D614G (Wuhan) strain and the UK, RSA, and BRA VOC was comparable to titers measured in DL2 sentinels and to titers measured using the same pseudoviruses in a cohort of EUA vaccine recipients (FIG. 49).

### T Cell Responses

[0287] T cell responses were evaluated by IFNγ/IL-4 ELISPOT. Cryopreserved PBMCs were stimulated overnight in vitro with peptide pools covering the whole vaccine antigens S and N and additionally with SARS-CoV-2 viral membrane (M) antigen peptide pools. The Spike peptides were divided into four sub-pools with 71-86 peptides in each sub-pool and Elispot responses to each pool were added to give the total response to S antigen. All peptides covering N antigen were included in a single N antigen pool. Elispot responses in mock-stimulated samples (DMSO) were subtracted from each sample (FIGS. 50 and 51).

[0288] As shown in FIGS. 51 and 52, all 4 DL1 sentinels developed S- and N-specific IFN-γ T cell responses post-prime. T cells were boosted by a second immunization and were stable up to day 120 with a trend for higher S- and N-IFNγ responses. Levels of IL-4 secreting T cells were very low or absent after both S and N stimulation. M-specific response was absent in all DL1 volunteers. DL2 sentinels had higher IFN-γ T-cell response to both S and N than DL1 sentinels. Post-boost IFN-γ T cell responses were higher than post-prime for some subjects and lower for others. IL-4 response to S and N, suggestive of a Th2 phenotype of T helper cells, was low in all subjects. M-specific T cell responses were low or absent. DL3 sentinels IFN-γ T-cell response peaked post-prime and levels post-boost were lower than post-prime for most of the sentinels.

[0289] IFN-γ and IL-4 T cell responses in COH04S1 sentinels were compared to levels measured in a pool of Pfizer/BioNTech vaccine recipients at days 56-60 and 90 post prime-immunization (FIG. 53). At both day 56-60 and day 90 COH04S1 sentinels showed comparable levels of S-specific IFN-γ and IL-4 T cells to EUA vaccine recipients. N-specific IFN-γ T cell responses were significantly higher than in EUA vaccine recipients due to the inclusion of N antigen into COH04S1 but not in mRNA vaccines.

[0290] These results demonstrate that immunization with COH04S1 successfully induced strong Th1 T cell responses to S and N and desirably low Th2 responses. The T cell responses elicited by the vaccine compositions disclosed herein were comparable to other EUA and investigational vaccines.

### Example 11: Construction of Additional sMVA Vaccines Based on SARS-CoV-2 Variants

[0291] Using the synthetic vaccine platform, sMVA vectors co-expressing full-length S and N antigen sequences based on the SARS-CoV-2 variant lineage B.1.351 first identified in South Africa were generated. These sMVA constructs were derived from two independent virus reconstitutions and are herein referred to as C163 and C164. The C163 and C164 sMVA vectors were constructed as disclosed above similar to the C35 sMVA vaccine vector that formed the basis of the clinical product COH04S1, with the difference that the codon-optimized gene sequences based on the Wuhan reference strain that were inserted into the Del3 and Del2 site in C163 and C164 were further modified to encode for S and N antigens with several mutations specific for the B.1.351 lineage (see FIGS. 86 and 87 as well as 111 and 112 for specific sequences). The recombinant sMVA vectors included N501Y, E484K, K417N, L18F, D80A, D215G, Del242-244, R246I, D614G, and A701I mutations in the S antigen and a T205I mutation in the N antigen. Western Blot analysis confirmed the expression of the S1 and S2 domains of the S protein and the N protein by the C163/C164 variant vectors with similar expression levels compared to the original C35 vaccine construct (FIG. 54).

[0292] Using the synthetic vaccine platform, an sMVA vector co-expressing full-length S and N antigen sequences based on the SARS-CoV-2 variant lineage P.1 first identified in Brazil was generated. This sMVA construct is herein referred to as C170. The C170 sMVA vector was constructed as disclosed above similar to the C35 sMVA vaccine vector that formed the basis of the clinical product COH04S1, with the difference that the codon-optimized gene sequences based on the Wuhan reference strain that were inserted into the Del3 and Del2 site in C170 were further modified to encode for S and N antigens with several mutations specific for the P.1 lineage (see FIGS. 92 and 93 as well as 113 and 114 for specific sequences). The recombinant sMVA vector included N501Y, E484K, K417T, L18F, T20N, P26S, D138Y, R190S, H655Y, T10271, and V1176F mutations in the S antigen and P80R, R203K, and G204R mutations in the N antigen. Western Blot confirmed the expression of the S1 and S2 domains of the S protein and the N protein by the C170 variant vector with similar expression levels compared to the original C35 vaccine construct (FIG. 55).

### REFERENCES

[0293] The references, patents and published patent applications listed below, and all references cited in the specification above are hereby incorporated by reference in their entirety, as if fully set forth herein.

[0294] 1. Volz, A. & Sutter, G. Modified Vaccinia Virus Ankara: History, Value in Basic Research, and Current Perspectives for Vaccine Development. Advances in virus research 97, 187-243 (2017).

[0295] 2. Gilbert, S.C. Clinical development of Modified Vaccinia virus Ankara vaccines. Vaccine 31, 4241-4246 (2013).

[0296] 3. Sutter, G. & Moss, B. Nonreplicating vaccinia vector efficiently expresses recombinant genes. Proceedings of the National Academy of Sciences of the United States of America 89, 10847-10851 (1992).

[0297] 4. Antoine, G., Scheiflinger, F., Dorner, F. & Falkner, F.G. The complete genomic sequence of the modified vaccinia Ankara strain: comparison with other orthopoxviruses. Virology 244, 365-396 (1998).

[0298] 5. Meisinger-Henschel, C. et al. Genomic sequence of chorioallantois vaccinia virus Ankara, the ancestor of modified vaccinia virus Ankara. The Journal of general virology 88, 3249-3259 (2007).

[0299] 6. Carroll, M.W. & Moss, B. Host range and cytopathogenicity of the highly attenuated MVA strain of vaccinia virus: propagation and generation of recombinant viruses in a nonhuman mammalian cell line. Virology 238, 198-211 (1997).

[0300] 7. Cottingham, M.G. & Carroll, M.W. Recombinant MVA vaccines: dispelling the myths. Vaccine 31, 4247-4251 (2013).

[0301] 8. Wussow, F. et al. A vaccine based on the rhesus cytomegalovirus UL128 complex induces broadly neutralizing antibodies in rhesus macaques. Journal of virology 87, 1322-1332 (2013).

[0302] 9. Wussow, F. et al. Human cytomegalovirus vaccine based on the envelope gH/gL pentamer complex. PLoS pathogens 10, e1004524 (2014).

[0303] 10. Chiuppesi, F. et al. Multiantigenic Modified Vaccinia Virus Ankara Vaccine Vectors To Elicit Potent Humoral and Cellular Immune Reponses against Human Cytomegalovirus in Mice. Journal of virology 92 (2018).

[0304] 11. La Rosa, C. et al. MVA vaccine encoding CMV antigens safely induces durable expansion of CMV-specific T cells in healthy adults. Blood 129, 114-125 (2017).

[0305] 12. Aldoss, I. et al. Poxvirus Vectored Cytomegalovirus Vaccine to Prevent Cytomegalovirus Viremia in Transplant Recipients: A Phase 2, Randomized Clinical Trial. Annals of internal medicine 172, 306-316 (2020).

[0306] 13. Yuan, Y. et al. Complete regression of cutaneous metastases with systemic immune response in a patient with triple negative breast cancer receiving p53MVA vaccine with pembrolizumab. Oncoimmunology 6, e1363138 (2017).

[0307] 14. Zhou, P. et al. A pneumonia outbreak associated with a new coronavirus of probable bat origin. Nature 579, 270-273 (2020).

[0308] 15. Zhu, N. et al. A Novel Coronavirus from Patients with Pneumonia in China, 2019. The New England journal of medicine 382, 727-733 (2020).

[0309] 16. Lurie, N., Saville, M., Hatchett, R. & Halton, J. Developing Covid-19 Vaccines at Pandemic Speed. The New England journal of medicine (2020).

[0310] 17. Smith, T.R.F. et al. Immunogenicity of a DNA vaccine candidate for COVID-19. Nature communications 11, 2601 (2020).

[0311] 18. Yu, J. et al. DNA vaccine protection against SARS-CoV-2 in rhesus macaques. Science (2020).

[0312] 19. Zhu, F.C. et al. Safety, tolerability, and immunogenicity of a recombinant adenovirus type-5 vectored COVID-19 vaccine: a dose-escalation, open-label, non-randomised, first-in-human trial. Lancet (2020).

[0313] 20. Ni, L. et al. Detection of SARS-CoV-2-Specific Humoral and Cellular Immunity in COVID-19 Convalescent Individuals. Immunity (2020).

[0314] 21. Long, Q.X. et al. Antibody responses to SARS-CoV-2 in patients with COVID-19. Nature medicine (2020).

[0315] 22. Premkumar, L. et al. The receptor binding domain of the viral spike protein is an immunodominant and highly specific target of antibodies in SARS-CoV-2 patients. Science immunology 5 (2020).

[0316] 23. Hoffmann, M. et al. SARS-CoV-2 Cell Entry Depends on ACE2 and TMPRSS2 and Is Blocked by a Clinically Proven Protease Inhibitor. Cell 181, 271-280 e278 (2020).

[0317] 24. Walls, A.C. et al. Structure, Function, and Antigenicity of the SARS-CoV-2 Spike Glycoprotein. Cell 181, 281-292 e286 (2020).

[0318] 25. Wrapp, D. et al. Cryo-EM structure of the 2019-nCoV spike in the prefusion conformation. Science 367, 1260-1263 (2020).

[0319] 26. Grifoni, A. et al. Targets of T Cell Responses to SARS-CoV-2 Coronavirus in Humans with COVID-19 Disease and Unexposed Individuals. Cell (2020).

[0320] 27. Merchlinsky, M. Mutational analysis of the resolution sequence of vaccinia virus DNA: essential sequence consists of two separate AT-rich regions highly conserved among poxviruses. Journal of virology 64, 5029-5035 (1990).

[0321] 28. Baroudy, B.M., Venkatesan, S. & Moss, B. Structure and replication of vaccinia virus telomeres. Cold Spring Harbor symposia on quantitative biology 47 Pt 2, 723-729 (1983).

[0322] 29. DeLange, A.M., Reddy, M., Scraba, D., Upton, C. & McFadden, G. Replication and resolution of cloned poxvirus telomeres in vivo generates linear minichromosomes with intact viral hairpin termini. Journal of virology 59, 249-259 (1986).

[0323] 30. DeLange, A.M. & McFadden, G. Efficient resolution of replicated poxvirus telomeres to native hairpin structures requires two inverted symmetrical copies of a core target DNA sequence. Journal of virology 61, 1957-1963 (1987).

[0324] 31. Merchlinsky, M., Garon, C.F. & Moss, B. Molecular cloning and sequence of the concatemer junction from vaccinia virus replicative DNA. Viral nuclease cleavage sites in cruciform structures. Journal of molecular biology 199, 399-413 (1988).

[0325] 32. Merchlinsky, M. & Moss, B. Resolution of linear minichromosomes with hairpin ends from circular plasmids containing vaccinia virus concatemer junctions. Cell 45, 879-884 (1986).

[0326] 33. Wussow, F. et al. Exploiting 2A peptides to elicit potent neutralizing antibodies by a multi-subunit herpesvirus glycoprotein complex. Journal of virological methods 251, 30-37 (2018).

[0327] 34. Scheiflinger, F., Dorner, F. & Falkner, F.G. Construction of chimeric vaccinia viruses by molecular cloning and packaging. Proceedings of the National Academy of Sciences of the United States of America 89, 9977-9981 (1992).

[0328] 35. Taylor, J., Weinberg, R., Kawaoka, Y., Webster, R.G. & Paoletti, E. Protective immunity against avian influenza induced by a fowlpox virus recombinant. Vaccine 6, 504-508 (1988).

[0329] 36. Mayr, A. & Malicki, K. [Attenuation of virulent fowl pox virus in tissue culture and characteristics of the attenuated virus]. Zentralblatt fur Veterinarmedizin. Reihe B. Journal of veterinary medicine. Series B 13, 1-13 (1966).

[0330] 37. Tscharke, D.C. et al. Identification of poxvirus CD8+ T cell determinants to enable rational design and characterization of smallpox vaccines. The Journal of experimental medicine 201, 95-104 (2005).

[0331] 38. Wyatt, L.S. et al. Elucidating and minimizing the loss by recombinant vaccinia virus of human immunodeficiency virus gene expression resulting from spontaneous mutations and positive selection. Journal of virology 83, 7176-7184 (2009).

[0332] 39. Wyatt, L.S., Shors, S.T., Murphy, B.R. & Moss, B. Development of a replication-deficient recombinant vaccinia virus vaccine effective against parainfluenza virus 3 infection in an animal model. Vaccine 14, 1451-1458 (1996).

[0333] 40. Wang, Z. et al. Modified H5 promoter improves stability of insert genes while maintaining immunogenicity during extended passage of genetically engineered MVA vaccines. Vaccine 28, 1547-1557 (2010).

[0334] 41. Jaume, M. et al. Anti-severe acute respiratory syndrome coronavirus spike antibodies trigger infection of human immune cells via a pH- and cysteine protease-independent FcgammaR pathway. J. Virol. 85, 10582-10597 (2011).

[0335] 42. Noyce, R.S., Lederman, S. & Evans, D.H. Construction of an infectious horsepox virus vaccine from chemically synthesized DNA fragments. PloS one 13, e0188453 (2018).

[0336] 43. Wyatt, L.S., Earl, P.L. & Moss, B. Generation of Recombinant Vaccinia Viruses. Current protocols in protein science 89, 5 13 11-15 13 18 (2017).

[0337] 44. Iwasaki, A. & Yang, Y. The potential danger of suboptimal antibody responses in COVID-19. Nature reviews. Immunology 20, 339-341 (2020).

[0338] 45. Graham, B.S. Rapid COVID-19 vaccine development. Science 368, 945-946 (2020).

[0339] 46. Crawford, K.H.D. et al. Protocol and Reagents for Pseudotyping Lentiviral Particles with SARS-CoV-2 Spike Protein for Neutralization Assays. Viruses 12 (2020).

[0340] 47. Wang, Z. et al. Recombinant modified vaccinia virus Ankara expressing a soluble form of glycoprotein B causes durable immunity and neutralizing antibodies against multiple strains of human cytomegalovirus. J. Virol. 78, 3965-3976 (2004).

[0341] 48. Tischer, B.K., von Einem, J., Kaufer, B. & Osterrieder, N. Two-step red-mediated recombination for versatile high-efficiency markerless DNA manipulation in Escherichia coli. Biotechniques 40, 191-197 (2006).

[0342] 49. Tischer, B.K., Smith, G.A. & Osterrieder, N. En passant mutagenesis: a two step markerless red recombination system. Methods Mol. Biol. 634, 421-430 (2010).

[0343] 50. Birnboim, H.C. & Doly, J. A rapid alkaline extraction procedure for screening recombinant plasmid DNA Nucleic acids research 7, 1513-1523 (1979).

[0344] 51. Earl, P.L., Moss, B., Wyatt, L.S. & Carroll, M.W. Generation of Recombinant Vaccinia Viruses. Current Protocols in Molecular Biology 43, 16.17.11-16.17.19 (1998).

[0345] 52. Millet, J.K. et al. Production of Pseudotyped Particles to Study Highly Pathogenic Coronaviruses in a Biosafety Level 2 Setting. J Vis Exp (2019).

[0346] 53. Rogers, T. F. et al. Isolation of potent SARS-CoV-2 neutralizing antibodies and protection from disease in a small animal model. Science 369, 956-963 (2020).

1. A vaccine composition for preventing or treating a coronavirus infection in a subject comprising:
(i) a single synthetic DNA fragment comprising the entire genome of an MVA, or two or more synthetic DNA fragments each comprising a partial sequence of the genome of the MVA such that the two or more DNA fragments, when transferred into the host cell upon co-transfection, are assembled sequentially and comprise the full-length sequence of the MVA genome, and
(ii) one or more DNA sequences encoding one or more coronavirus antigens, subunits, or fragments thereof, inserted in one or more insertion sites of the MVA, wherein the antigens are expressed in the host cell upon transfection of the one or more MVA DNA fragments.

2. The vaccine composition of claim 1, wherein the DNA sequences of the antigens, subunits, or fragments thereof are codon optimized for expression in the host cell or vaccinia virus.

3. The vaccine composition of claim 1 or claim 2, wherein the one or more DNA fragments further comprise a virus promoter upstream of the DNA sequences encoding the coronavirus antigens, subunits, or fragments thereof, a transcription termination signal downstream of the DNA sequences encoding the coronavirus antigens, subunits, or fragments thereof, or both.

4. The vaccine composition of claim 3, wherein the promoter comprises an m H5 promoter, a p7.5 promoter, or any other suitable native or synthetic vaccinia or poxvirus promoters.

5. The vaccine composition of any one of claims 1-4, wherein the DNA sequences encoding the antigens, subunits, or fragments thereof are inserted in one or more MVA insertion sites such as intergenic regions, non-essential genes and regions, and deletion sites.

6. The vaccine composition of any one of claims 1-5, wherein the one or more coronavirus antigens comprise the Spike (S) protein, the Nucleocapsid (N) protein, Membrane (M) protein, and Envelope (E) protein, papain-like protease, ORF1A, 3CL protease, ORF1B, endoribonuclease, matrix, helicase, protein 1a, protein 1b, or immunogenic fragments thereof.

7. The vaccine composition of claim 6, wherein the one or more coronavirus antigens comprise SARS-CoV-2 Spike (S) protein, SARS-CoV-2 Nucleocapsid (N) protein, or both.

8. The vaccine composition of claim 6 or claim 7, wherein the S protein or the N protein is fully mature or fully glycosylated.

9. The vaccine composition of any one of claims 6-8, wherein the expressed S protein is modified to comprise one or more of the mutations selected from the group consisting of F817P, A892P, A899P, A942P, K986P, V987P, and RRAR682-685GSAS.

10. The vaccine composition of any one of claims 7-9, wherein the S protein comprises a signal peptide at the N-terminus, or a transmembrane domain or a cytoplastic domain at the C-terminus.

11. The vaccine composition of any one of claims 7-10, wherein 19 amino acid residues at the C-terminus of the S protein are deleted.

12. The vaccine composition of any one of claims 7-11, wherein the sequence encoding the S protein or the N protein is codon optimized by silent codon alteration to avoid 4 or more of the same nucleotides in consecutive order.

13. The vaccine composition of any one of claims 7-12, wherein the S protein comprises one or more of the mutations selected from the group consisting of S13l, L18F, T19R, T20N, R21T, P26S, a deletion of histidine, and valine at positions 69 and 70, K77T, D80A, T95l, D138Y, G142D, a deletion of tyrosine at position 144, W152C, E154K, a deletion of glutamic acid and phenylalanine at amino acid position 156 and 157, R158G, R190S, D215G, Q218H, a deletion of leucine, alanine, and leucine at position 242-244, R246l, K417N, K417T, N439K, L452R, Y453F, S477N, T478K, E484K, E484Q, S494P, N501Y, S520S, A570D, D614G, H655Y, P681H, P681R, RRAR682-685GSAS, A701V, T716l, D950N, S982A, K986P, V987P, T1027l, Q1071H, H1101D, D1118H, and V1176F.

14. The vaccine composition of any one of claims 1-13, wherein the one or more antigens comprise the S1 domain, S2 domain, or receptor-binding domain (RBD) of the S protein.

15. The vaccine composition of claim 14, wherein the S1 domain, the S2 domain, or the RBD comprises a signal peptide at the N-terminus, or a transmembrane domain or a cytoplastic domain at the C-terminus.

16. The vaccine composition of claim 14, wherein the S1 domain comprises 698, 685, 680, or less amino acid residues of the N-terminus of the S protein.

17. The vaccine composition of claim 14, wherein the RBD comprises amino acid residues 331 to 524 or 319 to 541 of the S protein.

18. The vaccine composition of claim 14, wherein the one or more antigens comprise at least two RBDs from different strains of SARS-CoV-2.

19. The vaccine composition of claim 17, wherein the at least two RBDs are connected by one or more GS linkers.

20. The vaccine composition of any one of claims 7-19, wherein the N protein comprises one or more of the mutations selected from the group consisting of D3L, P80R, S235F, R203K, R203M, G204R, T205l, and D377Y.

21. The vaccine composition of any one of claims 1-20, further comprising a pharmaceutically acceptable carrier, adjuvant, additive or combination thereof.

22. A method of preventing a coronavirus infection in a subject comprising administering a prophylactically or therapeutically effective amount of the vaccine composition of any one of claims 1-21 to the subject.

23. The method of claim 22, wherein the subject is at a risk of being infected with a coronavirus.

24. The method of claim 23, wherein the coronavirus comprises a betacoronavirus.

25. The method of claim 24, wherein the betacoronavirus comprises MERS-CoV, SARS-CoV and SARS-CoV2, 229E, NL63, OC43, and HKU1.

26. The method of any one of claims 22-25, wherein the subject is at a risk of being infected with SARS-CoV-2 or a variant thereof.

27. A method of eliciting an immune response in a subject comprising administering a prophylactically or therapeutically effective amount of the vaccine composition of any one of claims 1-21 to the subject.

28. The method of claim 27, wherein the subject is at a risk of being infected with a coronavirus.

29. The method of claim 28, wherein the coronavirus comprises a betacoronavirus.

30. The method of claim 29, wherein the betacoronavirus comprises MERS-CoV, SARS-CoV and SARS-CoV2, 229E, NL63, OC43, and HKU1.

31. The method of any one of claims 27-30, wherein the subject is at a risk of being infected with SARS-CoV-2 or a variant thereof.

32. A method of producing a recombinant MVA vector comprising transfecting one or more DNA fragments into a host cell, wherein the one or more DNA fragments comprise the entire genomic DNA sequence of an MVA species, such that the MVA virus is reconstituted in the host cell, and wherein the one or more DNA fragments further comprise one or more DNA sequences encoding one or more antigens, subunits, or fragments thereof.

33. The method of claim 32, wherein the one or more DNA sequences encoding one or more antigens, subunits, or fragments thereof are inserted at one or more insertion sites of the MVA sequence.

34. The method of claim 32 or claim 33, further comprising infecting the host cell with a helper virus before, during, or after the transfection of the one or more DNA fragments to initiate the transcription of the one or more DNA fragments.

35. The method of claim 34, wherein the helper virus is Fowl pox virus (FPV).

36. The method of any one of claims 32-35, wherein the one or more DNA fragments are circularized before transfection or transfected in circular forms into the host cell.

37. The method of any one of claims 32-36, wherein the one or more DNA fragments are cloned into a plasmid or a bacterial artificial chromosome (BAC) vector.

38. The method of any one of claims 32-37, wherein the one or more antigens comprise Spike (S) protein, Nucleocapsid (N) protein, Membrane (M) protein, Envelope (E) protein, papain-like protease, ORF1A, 3CL protease, ORF1B, endoribonuclease, matrix, helicase, or immunogenic fragments thereof.

39. The method of any one of claims 32-38, wherein the one or more antigens comprise S protein, a variant thereof, a subunit thereof, or a fragment thereof, N protein, a variant thereof, a subunit thereof, or a fragment thereof, or both.

40. The method of claim 39, wherein the S protein or the N protein is in a prefusion form, stabilized, or mutated.

41. The method of any one of claims 38-40, wherein the S protein or the N protein is fully mature or fully glycosylated.

The application's sequence listing, which the Patent Office published only in electronic form, follows.

SEQUENCE LISTING (90 sequences)

SEQ ID NO: 1 - DNA, 171907 bp, Artificial Sequence
  sMVA-N/S
ttttatgagaccatcaaagagagaaagagaataaaaatattttttatgagaccatcaaagagagaaagagaataaaaatattttatgagaccatcaaagagagaaagagaataaaaatattttttatgagaccatcaaagagagaaagagaataaaaatattttatgagaccatcaaagagagaaagagaataaaaatattttttatgagaccatcaaagagagaaagagaataaaaatatttttgtatgagaccatcagaaagaggtttaatatttttgtgataccctgaaaggaaataggaatagtgtcataatcgtatcacactattgagacagaaaaagaagaagtcgcgagaggtaactttttgttttgcaaaccggaatatagtgtccggtacacttttttaattcgtggtgtgcctgaatcgttcgattaaccctactcatccaatttcagatgaatagagttatcgattcagacacacgctttgagttttgttgaatcgatgagtgaagtatcatcggttgcaccttcagatgccgatccgtcgacatacttgacctcaagttcagatgattccttgcacatgtctccgatacgaacgctaaactctagattcttgacacattttgtatcgacgatcgttgaaccgatgatatcttcgtaactcactttcttatgagagatgttagacccgagtactggatgggtcttgatgtcgctgtctttctcttcttcgctacatctgatgtcgatagacacctcacagtctttccatcagcggattctgagatggatttaatctgaggacatttggtgaatccaaagttcattctcagacctccaccgatgatggagtaataagtggtaggaggatctacatcctcgactgattccacctcgggatctggatctgactcggactctgtaatttccgttacggattggcaaatcttatcatcggtcggtgtttggtcttgctttgtgactttgataataacatcgattcccatatgatgtttgttttcttcttccgtacacgatgaggatgattgctgaagactggcaggcacatgcatgccagtacgatatattgtttcatgattgctattgattgagtactgttctttatgattctacttccttaccgtgcaataaattagaatatattttctacttttacgagaaattaattattgtatttatgggtgaaaaacttactataaaaagcgggtgggtttggaattagtgatcagtttatgtatatcgcaactaccgggcatatggctacattacccacatgataagagattgtatcagtttcgtagtcttgagtattggtattactatatagtatatagatgtcgacgctagagttactgtctccgaatgcggcatgatagtatcattctttgctttcgttaactgtttggaggaagaatctttgttattgcatttaatctcgaaattcagagtgcacacctttctcctgtaaagaaacctgaagtcgctaccttattaagaagacgggatcgcagtctttatgattcatagtaatagttagttccgacgttgagatggattcgctgagaccggtagtggtcgtccgagtacacgatgtgtcgttaactggatacaggttaatttccacatcgatatagttaaaggtatttctgggtacgggttcgcatttatctgcggaagagacggtgtgagaatatgttccgagaccacacggagaacagatgacgtctccggatactccgtatcctattccacattttgtttgggaaacacatgccttgcatccatgatcgggagagcattcacagattctattgtgagtcgtgttacacgatcgcgtcgacattgttgacagaaacgtgaccttcattcttaccgtcgtccataaatacgttaggtatgtaccacatactgtcgcgaacgatgcgtccatctcataatgatttactttttcataattaaagatgtgaaagaaaaccgaacaatatatttttttagtaatgtttatgcgagacatataaaataaactccgtgtttatgatgccggtaaatgtttttatcatcttggacggaatcgattttgtaatatgccatggaaacaggacattatcactccatgataaattatttaatggagtcgatcctctcattgttctttgcgtatctcaatctgtggcgtttgcttcgtttaaataatatatcaaacatggagacgcctgatatgtaggcattcttcattctattaatgtctgctctatagcgctttagttccttatgacgaccggcgatatcatacttactttagaaggaaaatcatcatctaggattaaggcgtatctgatacaggcgaataatggttcaggatatagatagcgtatatctctattaaatgcgtcaatcatagtctctagagtgggatggtaactcagtaataaatcaactagcttctctttggtaactgcttttctggatggccgtattgattatcgagcgtgacactcgctccatattccaataaccgctttgcaaattgtatattattgacatcgaccgcgtaatatagtagagttatcgatcatatctatatcatccatgtacttgcttagtatatcaaatacatcttcataacagtgatacccgcaattattaaatctcgataatatcagaccgtacatacatagacggccattgttagatatgtgatttacagccgcgtgtccatattttccacgataaaccttacgacgtttacatcgacgagattattattaacaaagttgttgtccgtcgtcttatccaacatgcattgaatgataggtatacttaccatatcgccgtaatgtaagtagtttatcagtatggcttgtacgatggattcatcctgttgtctaaatctctttagaatgttatcgatgatgtagtggttatattctctggaatcgtacgaagtaatactacgcattacgtcgacaagagtatgacgtctctcaataagaagattaacgatttccatgtctacattatatggggttactctaaatcgcttgtttagataatacgcctctaatatagggctgacgtcgtatactctacacgtgtccacatcctttattaataatctctatatctatggttgagcaagaccagtagtattggatggaaacattgttatcgatcaaacatttaattacatccttggatagagattctctatgagacgatatatagtaatgaagagagttcttacacatatcactgttgtacatacaggtacgaaatacgtaaccggtgctgtaacattctgatttaagaagccatagcaatacttctggtctcggattaggcgtcgttacgtatatatccaccaatccgagaccattgattgcataattcgtattcttggacggacgtatccgtttatccacaattaggtattttagcagacgtaagtcgaaatcatttatattcgacttgagttcgttagaggaattcgaatagctggatatcagtagatgcacaatctgagattttacgtatctatgcttactgtatgctcctagcggagttaatccttcgttgtttctacaaagtctctcgactccgcgagagagtaacagtcgaacaatcttaatgtctgtatcgcatttattggagacgtaacaatgtagcgcattgtttcctcgtctatctatatgttttgataagttgtgacacgtttcaatttctagttttatttttttgtacgtcacatcttcatccagtagacgacatagaatacatgtgcaatccatagctattctggtgctaattattcctcataagatgataaaaagtgtagtgagagagcatgaaggagatttagtatttagcagtgcggatatgatccaagagggtgagatagtcgttctcgttcagaatctttcgcagcataagtagtatgtcgatatacttatcgttgaagactcttccagagacgatagctgattgagtacaaagtccaatgattgcacgaagttcttcggcggttttcatggagtcatttctgatgaaacatttaatgatctaaatttcagtttatgtttgtaccccgtattcatacttaacaaattggtattacataccattaataatgcaagcataaaaaatcgttagtagatgtttctaaatataggttccgtaagcaaagaatataagaatgaagcggtaatgataaaatcaatcgttatctaaaatgatcatactcatttattttattctattatattaacacatacatttttaacagcaacacattcaatattgtattgttatttttatattatttacacaattaacaatatattattagtttatattactgaattaataatataaaattcccaatcttgtcataaacacacactgagaaacagcataaacacaaaatccatcaaaaatgttgataaattatctgatgttgttgttcgctgctatgataatcagatcattcgccgatagtggtaacgctatcgaaacgacatcgccagaaattacaaacgctacaacagatattccagctatcagattatgcggtccagagggagatggatattgtttacacggtgactgtatccacgctagagatatcgacggtatgtattgtagatgctctcatggttatacaggcattagatgtcagcatgtagtattagtagactatcaacgttcagaaaaaccaaacactacaacgtcatatatcccatctcccggtattatgcttgtattagtaggcattattattattacgtgttgtctattatctgtttataggttcactcgacgaactaaactacctatacaagatatggttgtgccataatttttataaattttttttatgagtatttttacaaaaatgtataaagtgtatgtcttatgtatatttataaaaatgctaaatatgcgatgtatctatgttatttgtatttatctaaacaatacctctacctctagatattatacaaaaattttttatttcggcatattaaagtaaaatctagttaccttgaaaatgaatacagtgggtggttccgtatcaccagtaagaacataatagtcgaatacagtatccgattgagattttgcatacaatactagtctagaaagaaatttgtaatcatcttctgtgacgggagtccatatatctgtatcatcgtcccatgctatattcctgttatcatcattagttaatgaaaataactctcgtgcttcagaaaagtcaaatattgtatccatacatacatctccaaaactatcgcttatacgtttatctttaacgatacctatacctagatggttatttactaacagacattttccagatctattgactataactcctatagtttccacatcaaccaagtaatgatcatctattgttatataacaataacataactcttttccgtttttatcagtatgtatatctatatcaacgtcgtcgttgtagtgaatagtagtcattgatctattatatgaaacggatatgtctagaacggcaattgttttacgtccagttaacactttcgttgatttaaagtctagagtctttgcaaacataatatccttatccgactttatatttcctgtagggtggtataattttattttgcctccacatatcggtgtttccaaatatattactagacaatattccatatagttattagttaagggtacccaattagaacacgtacgcttattatcatcatttggatcgtatttcataaaagttattgtactatcgatgtcaacacattctacattttttaatcgtctatatagtatttttctgatattttctataatatcagaattgtcttccatcggaagttgtatactatcggaatcagttacatgtttaaataattctctgatgtcattccttatacaatcaaattcattattaaacagtttaatagtctgtagacctttatcgtcgtaaatatccattgtcttattagttacgcttatttttatgtgtttttacgttgctttattatattttataagaatgattgtttgacgaatcacgagaactattaagacacattattaggtatatattataaaaaagtttttgattacgatgttataagaggaaagaggacacattaacatcatacatcaattaactacattcttataacatcgtaatcaaaagaattgcaattttgatgtataacaactgtcaatgggttatggaattgtatattacatattatacggtatgttggtaacgacaaataccgatcggtaattgtctgccggtgtaatagaattatatatatctatctattacaccggccttgtatacataataataagttgtggtagtatgatctccatatttataatttaggactttgtattcagtttttttggaatcataaaaaataaaaaaaagttttactaatttaaaattatttacatttttttcactgtttagtcgcggatatggaattcgatcctgccaaaatcaatacatcatctatagatcatgtaacaatattacaatacatagatgaaccaaatgatataagactaacagtatgcattatcacaaaaataaatccacatttggctaatcaatttcgggcttggaaaaaacgtatcgccggaagggactatatgactaacttatctagagatacaggaatacaacaatcaaaacttactgaaactgtcaaaaaaatagaaacatatatggtctatatatacactacaatttagttattaattggataaccgatgtgattatcaatcaatattaagaaggttggtaaattggtacatagctaataatacctatacacccaataatacaacaaccatttctgagttggatatcatcaaaatactggataaatacgaggacgtgtatagagtaagtaaagaaaaagaatgtgaaatttgctatgaagttgtttactcaaaacgatagatactttggtttattggattcgtgtaatcatatattttgcataacatgcatcaatatatggcatagaacacgaagagaaaccggtgcgtcggataattgtcctatatgtcgtacccgttttagaaacataacaatgagcaagttaactaataaataaaaagtttaatttgttgacgacgtatgtcgttattttttctcgtataaaagattaatttgattctaatataatctttagtattggataaatatcaattcaaattaattccattagattatatcataaataaaaatagtagcacgcactacttcagccaaatattcttttttgaaacgccatctatcgtagtgaggacacaagtgaacctataatgagcaaatttattagtatcggttacatgaaggactttacgtagagtggtgattccactatctgtggtacgaacggtttcatcttctttgatgccatcacccagatgttctataaacttggtatcctttgccaaccaatacatatagctaaactcaggcatatgttccacacatcctgaacaatgaaattctccagaagatgttacaatgtctagatttggacatttggtttcaaccgcgttaacatatgagtgaacacacccatacatgaaagcgatgagaaataggattttcatcttgccaaaatatcactagaaaaaatttatttatcaattttaaaggtataaaaaatacttattgttgctcgaatattttgtatttgatggtatacggaagattagaaatgtaggtattatcatcaactgattctatggttttatgtattctatcatgtttcactattgcgttggaaataatatcatatgcttccacatatattttattttgttttaactcataatactcacgtaattctggattattgacatatctatgaataattttagctccatgatcagtaaatattaatgagaacatagtattaccacctaccattatttttttcatctcattcaattcttaattgcaaagatctatataatcattatagcgttgacttatggactctggaatcttagacgatgtacagtcatctataatcatggcatatttaatacattgttttatagcatagtcgttatctacgatgttagatatttctctcaatgaatcaatcacacaatctaatgtaggtttatgacataatagcattttcagcagttcaatgtttttagattcgttgatggcaatggctatacatgtatatccgttatttgatctaatgttgacatctgaaccggattctagcagtaaagatactagagattgtttattatatctaacagccttgtgaagaagtgtttctcctcgtttgtcaatcatgttaatgtctttaagataaggtaggcaaatgtttatagtactaagaattgggcaagcataagacatgtcacaaagaccctttttgtatgtataagtgtaaaaattataacattcatagttggatttacataggtgtccaatcgggatctctccatcatcgagataattgatggcatctcccttccttttttagtagatatttcatcgtgtaagaatcaatattaatatttctaaagtatccgtgtatagcctctttatttaccacagttccatattccactagagggatatcgccgaatgtcatatactcaattagtatatgttggaggacatccgagttcattgttttcaatatcaaaaagatggtttccttatcatttctccatagtggtacaatactacacattattccgtgcggctttccattttccaaaaacaatttgaccaaatctacatctttattgtatctataatcactatttagataatcagccataattactcgagtgcaacatgttagatcgtctatatatgaataagccgtgttatctattcctttcattaacaatttaacgatgtctatatctatatgagatgacttaatataatattgaagagctgtacaatagtttttatctataaaagacggcttgattccgtgattaattagacatttaacaacttccggacgcacatatgctctcgtatccgactctgaatacagatgagagatgatatacagatgcaatacggtaccgcaatttcgtagttgataatcatcatacgcgtatcagtactcgtcctcataaagaacactgcagccattttctatgaacaaatcaataatttcaggaacaggatcatctgtcattacataattttctataactgaacgatggttttcacatttaacactcaagtcaaatccatgttctaccaacacctttatcaagtcaacgtctacatttttggatttcatatagctgaatatattaaagtcatttatgttgctaaatccagtggcttctagtagagccatcgctatatcctttaactttaacatgtctactatttgtgtattcttctaatggggtagctgtctccaatttttgcgtaatggattagtgccactgtctagtagtagtttgacgacctcgacattattacaatgctcattaaaaaggtatgcgtgtaaagcattattcttgaattggttcctggtatcattaggatctctgtctctcaacatctgtttaagttcatcgagagccacctcctcattttccaaatagtcaaacattttgactgaatgagctactgtgaactctatacacccacacaactaatgtcattaaatatcatgtcaaaaacttgtacaattattaataaaaataatttagtgtttaaattttaccagttccagattttacacctccgttaaccccactttttacaccactggacgatcctcctccccacattccaccgccaccagatgtataagttttagatcctttattactaccatcatgtccatggataaagacactccacatgccgccactaccccctttagaagacatattaataagacttaaggacaagtttaacaataaaattaatcacgagtaccctactaccaacctacactattatatgattatagtttctatttttacagtaccttaactaaagtctctagtcacaagagcaatactaccaacctacactattatatgattatagtttctatttttataggaacgcgtacgagaaaatcaaatgtctaatttctaacggtagtgttgataaacgattatcgtcaatggatacctcctctatcatgtcgtctattttcttactttgttctattaacttattagcattatatattatttgattataaaacttatattgcttattagcccaatctgtaaatatcggattattaacatatcgtttctttgtaggtttatttaacatgtacatcactgtaagcatgtccgtaccatttattttaatttgacgcatatccgcaatttctttttcgcagtcggttataaattctatatatgatggatacatgctacatgtgtacttataatcgactaatatgaagtacttgatacatattttcagtaacgatttattattaccacctatgaataagtacctgtgatcgtctaggtaatcaactgttttcttaatacattcgatggttggtaatttactcagaataatttccaatatcttaatatataattctgctatttctgggatatatttatctgccagtataacacaaatagtaatacatgtaaacccatattttgttattatattaatgtctgcgccattatctattaaccattctactaggctgacactatgcgacttaatacaatgataaagtatactacatccatgtttatatcatcaatatacggcttacaaagttttagtatcgataacacatccaactcacgcatagagaaggtagggaataatggcataatatttattaggttatcatcattgtcattatctacaactaagtttccattttttaaaatatactcgacaactttaggatctctattgccaaatttttgaaaatatttatttatatgcttaaatctatataatgtagctccttcatcaatcatacatttaataacattgatgtatactgtatgataagatacatattctaacaatagatcttgtatagaatctgtatatcttttaagaattgtggatattattacgtaaactattacacaattctaaaatataaaacgtatcacggtcgaataatagttgatcaactatataattatcgattttgtgatttttcttcctaaactgtttacgtaaatagttagatagaatattcattagttcatgaccactatagttactatcgaataacgcgtcaaatatttcccgtttaatatcgcatttgtcaagataataatagagtgtggtatgttcacgataagtataataacgcatctctttttcgtgtgaaattaaatagtttattacgtccaaagatgtagcataaccatcttgtgacctagtaataatataataatagagaactgttttacccattctatcatcataatcagtggtgtagtcgtaatcgtaattgtctaattcatcatcccaattataatattcaccagcacgtctaatctgttctattttgatcttgtatccatactgtatgttgctacatgtaggtattcctttatccaataatagtttaaacacatctacattgggatttgatgttgtagcgtatttttctacaatattaataccatttttgatactatttatttctatacctttcgaaattagtaatttcaataagtctatatcgatgttatcagaacatagatattcgagtatatcaaaatcattgatatttttatagtcgactgacgacaataacaaaatcacaacatcgtttttgatattattatttttcttggtaacgtatgcctttaatggagtttcaccatcatactcatataatggatttgcaccactttctatcaatgattgtgcactgctggcatcgatgttaaatgttttacaactatcatagagtatcttatcgttaaccatgattggttgttgatgctatcgcattttttggtttctttcatttcagttatgtatggatttagcacgtttgggaagcatgagctcatatgatttcagtactgtagtgtcagtactattagtttcaataagatcaatctctagatctatagaatcaaaacacgataggtcagaagataatgaatatctgtaggcttcttgttgtactgtaacttctcgttttgttagatgtttgcatcgtgctttaacatcaatggtacaaattttatcctcgctttgtgtatcatattcgtccctactataaaattgtatattcagattatcatgagatgtgtatacgctaacggtatcaataaacggagcacaccatttagtcataaccgtaatccaaaaatttttaaagtatatcttaacgaaagaagttgtgtcattgtctacggtgtatggtactagatcctcataagtgtatatatctagagtaatgtttaatttatcaaatggttgataatatggatcctcatgacaatttccgaagatggaaatgagatatagacatgcaataaatctaattgcggacatggttactccttaaaaaaatacgaataatcaccttggctatttagtaagtgtcatttaacactatactcatattaatccatggactcataatctctatacgggattaacggatgttctatatacggggatgagtagttttcttctttaactttatactttttactaatcatatttagactgatgtatgggtaatagtgtttaaagagttcgttctcatcatcagaataaatcaatatctctgtttttttgttatacagatgtattacagcctcatatattacgtaatagaacgtgtcatctaccttattaactttcaccgcatagttgtttgcaaatacggttaatcctttgacctcgtcgatttccgaccaatctgggcgtataatgaatctaaactttaatttcttgtaatcattcgaaataatttttagtttgcatccgtagttatcccctttatgtaactgtaaatttctcaacgcgatatctccattaataatgatgtcgaattcgtgctgtatacccatactgaatggatgaacgaataccgacggcgttaatagtaatttactttttcatctttacatattgggtactagttttactatcataagtttataaattccacaagctactatggaataagccaaccatcttagtataacacacatgtcttaaagtttattaattaattacatgttgttttatatatcgctacgaatttaaacagagaaatcagtttaggaaaaaaaaatatctatctacatcatcacgtctctgtattctacgatagagtgctactttaagatgagacatatccgtgtcatcaaaaatatactccattaaaatgattattccggcagcgaacttgatattggatatatcacaacctttgttaatatctacgacaatagacagcagtcccatggttccataaacagtgagtttatctttctttgaagagatattttgtagagatcttataaaactgtcgaatgacatcgcatttatatctttagctaaatcgtatatgttaccatcgtaatatctaaccgcgtctatcttaaacgtttccatcgctttaaagacgtttccgatagatggtctcatttcatcagtcatactgagccaacaaatataatcgtgtataacatctttgatagaatcagactctaaagaaaacgaatcggctttattatacgcattcatgataaacttaatgaaaaatgtttttcgttgtttaagttggatgaatagtatgtcttaataattgttattatttcattaattaatatttagtaacgagtacactctataaaaacgagaatgacataactagttatcaaagtgtctaggacgcgtaattttcatatggtatagatcctgtaagcattgtctgtattctggagctattttctctatatctaatttctgaacgttcaccaatgtctctagccactttggcactaatagcgatcattcgcttagcgtcttctatattattaactggttgattcaatctatctagcaatggaccgtcggacagcgtcattctcatgttcttaatcaatgtacatacatcgccgtcatctaccaattcatccaacaacataagctttttaaaatcatcattataataggtttgatcgttgtcatttctccaaagaatatatctaataagtagagtcctcatgattagttaacaactattttttatgttaaatcaattagtacaccgctatgtttaatacttattcatattttagtttttaggattgagaatcaatacaaaaattaatgcatcattaattttagaaatacttagtttccacgtagtcaatgaaacatttgaactcatcgtacaggacgttctcgtacaggacgtaactataaaccggtttatatttgttcaagatagatacaaatccgataactttttttacgaattctacgggatccactttaaaagtgtcataccgggttctttttatttttttaaacagattaatggtgtgatgttgattaggtcttttacgaatttgatatagaatagcgtttacatattctccataatggtcaatcgccatttgttcgtatgtcataaattctttaattatatgacactgtgtattatttagttcatccttgttcatcattaggaatctatccaatatggcaattatactagaactataggtgcgttgtatacacatattgatgtgtctgtttatacaatccatgctactaccttcgggtaaaattgtagcatcatataccatttctagtactttaggttcattgttatccattgcagaggacgtcatgaacgcatcctaaaaaaatatattatttttatgttattttgttaaaaataatcatcgaatacgaactagtataaaaaggcgcgccttaggcctgagttgagtcagcactgctcatggattgttgcaattgtttggagaaatcatccaaatctgcagcaggaagaagagtcacagtttgctgtttcttctgtctctgcggtaaggcttgagtttcatcagccttcttcttcttgtccttcttaggctctgttggtgggaatgtcttgtatgcgtcaatatgcttattcagcaatatgacttgatctttgaaatttggatctttgtcatccaatttgatggcacctgtgtaggtcaaccacgttcccgaaggtgtgacttccatgccaatgcgcgacattccgaagaacgctgaagcgctgggagcaaattgtgcaatttgcggccaatgtttgtaatcagttccttgtctgattagttcctggtctccaaagtttccttgggtttgttctggaccacgtctgccgaaagcttgtgttacattgtatgctttagtggcagtacgtttctgccgaggcttcttagaagcctcagcagcagatttcttagtgacagtttggccttgttgttgttggcctttaccagacatcttgctctcaagctggttcaatctgtcaagcagcagcaaagcaagagcagcatcaccgccattgccagccattctagcaggagaagttcctctactgctgcctggagttgaatttcttgaactgttgcgactacgtgatgaggaacgagaagaggcttgactgccgcctctgctcccttctgcgtagaagcctttaggcaatgttgttccttgaggaagttgtagcacgattgcagcattgttagcaggattgcgggtgccaatgtgatctttaggtgtattcaaggctccctcagttgcaacccatatgatgccgtctttgttagcaccatagggaagtccagcttctggcccagttcctaggtagtagaaataccatcttggactgagatctttcatcttaccgtcaccaccacgaattcgtctggtagctcttcggtagtagccaatttggtcatctggactgctattggtgttaattggaacgccttgtcctcgagggaatttaaggtcttccttgccatgttgagtgagagcggtgaaccaagacgcagtattattgggtaaaccttgaggccgacgttgtttagatcgcgctccactgcgttctccattctggttactgccagttgaatctgagggtccaccaaacgtaatgcgtggtgcgtttcgctgattctgtggtccgttatcagacatggtggcggcgtttatcttatttatgattatttctcgctttcaatttaacacaaccctcaagaacctttgtatttattttcaatttttgaatcatccagtccactgaatagcaaaatctttactattttggtatcttccaatgtggctgcctgatgtaatggaaattcattctctagaagatttttcaatgctccagcgttcaacaacgtacatactagacgcacgttattatcagctattgcataatacaaggcactatgtccatggacatccgccttaaatgcatctttgctagagagaaagcttttcagctgcttagacttccaagtattaattcgtgacagatccatgtctgaaacgagacgctaattagtgtataatttttgtcatattgcaccagaattaataatatctctaatagatctgattagtagatacatggctatcgcaaaacaacatatacacatttaataaaaataatatttattaagaaaattcagatttcacgtacccatcaatataaataaaataatgattccttacaccgtacccatattaaggagattctaccttacccataaacaatataaatccagtaatatcatgtctgatgatgaacacaaatggtgtattaaattccagtttttcaggagatgatctcgccgtagctaccataatagtagatgcctctgctacagttccttgttcgtcgacatctatctttgcattctgaaacattttataaatatataatgggtccctagtcatatgtttaaacgacgcattatctggattaaacatactaggagccatcatttcggctatcgacttaatatccctcttattttcgatagaaaatttagggagtttaagattgtacactttattccctaattgaaacgaccaatagtctaattttgcagccgtaatagaatctgtgaaatgggtcatattatcacctattgccaggtacatactaatattagcatccttatacggaaggcgtaccatgtcatattctttgtcatcgattgtgattgtatttccttgcaatttagtaactacgttcatcatgggaaccgttttcgtaccgtacttattagtaaaactagcattgcgtgttttagtgatatcaaacggatattgccatatacctttaaaatatatagtattaatgattgcccatagagtattattgtcgagcatattagaatctactacattagacataccggatctacgttctactatagaattaattttattaaccgcatctcgtctaaagtttaatctatataggccgaatctatgatattgttgataatacgacggtttaatacacacagtattatctacgaaactttgataagttagatcagtgtacgtatatttagatgttttcagcttagctaatcctgatattaattctgtaaatgctggacccagatctctttttctcaaatccatagtcttcaataattctattctagtattacctgatgcaggcaatagcgacataaacatagaaaacgaataaccaaacggtgagaagacaatattatcatcttgaatatttttatacgctactataccggcattggtaaatccttgtagacgataggtagacgctgaacacgttaacgatagtatcaataacgcaatcatgattttatggtattaataattaaccttatttttatgttcggtataaaaattattgatgtctacacatccttttgtaattgacatctatatatccttttgtataatcaactctaatcactttaacttttacagttttccctaccagtttatccctatattcaacatatctatccatatgcatcttaacactctctgccaagatagcttcagagtgaggatagtcaaaaagataaatatatagagcataatcattctcgtatactctgccctttattacatcgcccgcattgggcaacgaataacaaaatgcaagcatcttgttaacgggctcgtaaattgggataaaaattatgtttttatatctattttattcaagagaatattcaggaatttctttttccggttgtatctcatcgcagtatatatcatttgtacattgtttcatattttttaatagtttacaccttttagtaggactagtatcgtacaattcatagctgtattttgaattccaatcacgcataaaaatatcttctaattgttgacgaagacctaatccatcatccggtgtaatattaatagatgctccacatgtatccgtaaagtaatttcctgtccaatttgaggtacctatataggccgttttatcggttaccatatatttggcatggtttaccctagaatacggaatgggaggatcagcatctggtacaataaatagctttacttctatatttatgtttttagattttagcatagcgatagatcttaaaaagtttctcatgataaacgaagatcgttgccagcaactaatcaatagcttaacggatacttgtctgtctatagcggatcttcttaattcatcttctatataaggccaaaacaaaattttacccgccttcgaataaataatagggataaagttcataacagatacataaacgaatttactcgcatttctaatacatgacaataaagcggttaaatcattggttctttccatagtacatagttgttgcggtgcagaagcaataaatacagagtgtggaacaccacttacgttaatactaagaggatgatctgtattataatacgacggataaaagtttttccaattatatggtagattgttaactccaagataccagtatacctcaaaaatttgagtgagatccgctgccaagttcctattattgaagatcgcaatacccaattctttgacctgagttagtgatctccaatccatgttagcgcttcctaaataaatatgtgtattatcagatatccaaaattttgtatgaagaactcctcctaggatatttgtaatatctatgtatcgtacttcaactccggccatttgtagtctttcaacatcctttaatggtttgttagatttattgacggctactctaactcgtactcctcttttgggtaattgtacaatctcgtttaatattatcgtgccgaaattcgtacccacttcatccgataaactccaataaaaagatgatatatctagtgtttttgtggtattggatagaatttccctccacatgttaaatgtagacaaatatactttatcaaattgcatacctataggaatagtctctgtaatcactgcgattgtattatccggattcattttatttgttaaaagaataatcctatatcacttcactctattaaaaatccaagtttctatttctttcatgactgattttttaacttcatccgtttccttatgaagatgatgtttggcaccttcataaatttttatttctctattacaatttgcatgttgcatgaaataatatgcacctaaaacatcgctaatctcattgtttgttccctggagtatgagagtcggggtgttaatcttggaaattatttttctaaccttgttggtagccttcaagacctgactagcaaatccagccttaattttttcatgattgattaatgggtcgtattggtatttataaactttatccatatctctagatactgattctggacatagctttccgactggcgcatttggtgtgatggttcccataagtttggcagctagcagattcagtcttgaaacagcatctgcattaactagaggagacattagaatcattgctgtaaacaagtttggattatcgtaagaggctagtatagaaattgttgctcccatggaatgacccaataagtagatttaatagttaccacgtgctgtaccaaagtcatcaatcatcattttttcaccattacttcttccatgtccaatatgatcatgtgagaatactaaaattcctaacgatgatatgttttcagctagttcgtcataacgtccagaatgtttaccagctccatgacttatgaatactaatgccttaggatatgtaatcattgtccagattgaacatacagtttgcactcatgattcacgttatataactatcaatattaacagttcgtttgatgatcatattatttttatgttttattgataattgtaaaaacatacaattaaatcaatatagaggaaggagacggctactgtcttttgtgagatagtcatggcgactaaattagattatgaggatgctgttttttactttgtggatgatgataaaatatgtagtcgcgactccatcatcgatctaatagatgaatatattacgtggagaaatcatgttatagtgtttaacaaagatattaccagttgtggaagactgtacaaggaattgatgaagttcgatgatgtcgctatacggtactatggtattgataaaattaatgagattgtcgaagctatgagcgaaggagaccactacatcaattttacaaaagtccatgatcaggaaagtttattcgctaccataggaatatgtgctaaaatcactgaacattggggatacaaaaagatttcagaatctagattccaatcattgggaaacattacagatctgatgaccgacgataatataaacatcttgatactttttctagaaaaaaaattgaattgatgatataggggtcttcataacgcataattattacgttagcattctatatccgtgttaaaaaaaattatcctatcatgtatttgagagttttatatgtagcaaacatgatagctgtgatgccaataagctttagatattcacgcgtgctagtgttagggatggtattatctggtggtgaaatgtccgttatataatctacaaaacaatcatcgcatatagtatgcgatagtagagtaaacatttttatagtttttactggattcatacatcgtctacccaattcggttatgaatgaaattgtcgccaatcttacacccaaccccttgttatccattagtatagtattaacttcgttatttatgtcataaactgtaaatgattttgtagatgccatatcatacatgatattcatgtccctattataatcattactaactttatcacaatatatgttgataatatctatatatgatctagtctttgtgggcaactgtctatacaagtcgtctaaacgttgtttactcatatagtatcgaacagccatcattacatggtcccgttccgttgatagataatcgagtatgttagtggacttgtcaaatctatataccatattttctggaagtggatatacatagtcgtgatcaacattattgctagcctcatcttctatatcctgtactataccatctacataatctacgatattattacacataaacatcgacaacatactattgtttattatctaagtcctgttgatccaaacccttgatctcctctatttgtactatctagagattgtacttcttccagttctggataatatatacgttgatagattagctgagctattctatctccagtatttacattaaacgtacattttccattattaataagaatgactcctatgtttcccctataatcttcgtctattacaccacctcctatatcaatgccttttagtgacagaccagacctaggagctattctaccatagcaaatcttaggcatggacatactaatatctgtcttaattaactgtctttctcctggagggatagtataatcgtaagcgctatacaaatcatatccggcagcacccggcgattgcctagtaggagatttagctctgttagtttccttaacaaatctaactggtgagttaatattcatgttgaacataaaactaatattttatttcaaaattatttaccatcccatatattccatgaataagtgtgatgattgtacacttctatagtatctatatacgattcacgataaaatcctcctatcaatagcagtttattatccactatgatcaattctggattatccctcggataaataggatcatctatcagagtccatgtattgctggattcacaataaaattccgcatttctaccaaccaagaataaccttctaccgaacactaacgcgcatgatttataatgaggataataagtggatggtccaaactgccactgatcatgattgggtagcaaatattctgtagttgtatcagtttcagaatgtcctcccattacgtatataacattgtttatggatgccactgctggattacatctaggtttcagaagactcggcatattaacccaagcagcatccccgtggaaccaacgctcaacagatgtgggatttggtagacctcctactacgtataatttattgttagcgggtatcccgctagcatacagtctggggctattcatcggaggaattggaatccaattgtttgatatataatttacagctatagcattgttatgtatttcattgttcatccatccaccgatgagatatactacttctccaacatgagtacttgtacacatatggaatatatctataatttgatccatgttcataggatactctatgaatggatacttgtatgatttgcgtggttgtttatcacaatgaaatattttggtacagtctagtatccattttacattatttatacctctgggagaaagataatttgacctgattacatttttgataaggagtagcagatttcctaatttatttcttcgctttatataccacttaatgacaaaatcctcatctggaacatttagttcatcgctttctagaataagtttcatagatagataatcaaaattgtctatgatgtcatcttccagttccaaaaagtgtttggcaataaagtttttagtatgacataagagattggatagtccgtattctatacccatcatgtaacactcgacacaatattcctttctaaaatctcgtaggataaagtttatacaagtgtagatgataaattctacagaggttaatatagaagcacgtaataaattgacgacgttatgactatctatatatacctttccagtatatgagtaaataactatagaagttagactgtgaatgtcaaggtctagacaaaccctcgtaactggatctttatttttcgtgtatttttgacgtaaatgtgtgcgaaagtaaggagataactttttcaatatcgtagaattgactattatattgcctcctatggcatcaataattgttttgaatttcttagtcatagacaatgctaatatattcttacagtacacagtattgacaaatatcggcatttatgtttctttaaaagtcaacatctaaagaaaaatgattatcttcttgagacataactcccattttttggtattcacccacacgtttttcgaaaaaattagttttaccttctaatgatatattttccatgaaatcaaacggattggtaacattataaatttttttaaatcccaattcagaaatcaatctatccgcgacgaattctatatatgttttcatcatttcacaattcattcctataagtttaactggaagagccgcagtaagaaattcttgttcaatggataccgcatctgttataatagatctaacggtttcttcactcggtggatgcaataaatgtttaaacatcaaacatgcgaagtcgcagtgtagaccctcgtctctactaatcaattcgttggaaaacgtgagtccgggcattaggccacgctttttaagccaaaatatggaagcgaatgatccggaaaagaagattccttctactgcagcaaaggcaataagtctctctccataaccggcgctgtcatgtatccacttttgagcccaatcggccttcttttttacacaaggcatcgtttctatggcattaaagagatagtttttttcattactatctttaacataagtatcgatcaaaagactatacatttccgaatgaatgttttcaatggccatctgaaatccgtagaaacatctagcctcggtaatctgtacttctgtacaaaatcgttccgccaaattttcattcactattccgtcactggctgcaaaaaacgccaatacatgttttataaaatatttttcgtctggtgttagtttattccaatcattgatatctttagatatatctacttcttccactgtccaaaatgatgcctctgcctttttatacatgttccagatgtcatgatattggattgggaaaataacaaatctatttggatttggtgcaaggatgggttccataactaaattaacaataacaataaattttttttcagttatctatatgcctgtacttggatcttttgtacatcgatatcgccgcaatcactacaataattacaagtattattgatagcattgttattagtactatcataattaaattatcgttattatcattttgtaattgtgacatcatactagataaatcgtttgcgagattgttgtgggaagcgggcatggaggatgaattatcgttattattatttaaagcctcccattcggattcacaaatatggcgcgcgttcaacattttatggaaacagataacaagaaaactcgtcatcgttcaaatttttaacgatagtaaaccgattaaacgtcgagctaatttctaacgctagcgactctgttggatatgggtttccagatatatatcttttcagttcccctacgtatctataatcatctgtaggaaatggaagatatttccatttatctactgttcctaatatcatatgtggtggtgtagtagaaccattaagcgcgaaagatgttatttcgcatcgtattttaacttcgcaataatttctggttagataacgcactctaccagtcaagtcaatgatattagcctttacagatatattcatagtagtcgtaacgatgactccatcttttagatgcgatactcctttgtatgtaccagaatcttcgtacctcaaactcgatatatttaaacaagttaatgagatattaacgcgttttatgaatgatgatatataaccagaagttttatcctcggtggctagcgctataaccttatcattataataccaactagtgtgattaatatgtgacacgttagtgtgggtacaaatatgtacattatcgtctacgtcgtattcgatacatccgcatacagccaacaaatataaaatgacaaatactctaacgccgttcgtacccatcttgatgcggtttaataaatgttttgatttcaatttattgtaaaaaaagattcggttttatactgttcgatattctcattgcttatattttcatctatcatctccacacagtcaaatccgtggttagcatgcacctcatcaaccggtaaaagactatcggactcttctatcattataactctagaatatttaatttggtcattattaatcaagtcaattatcttatttttaacaaacgtgagtattttactcattttttataaaaacttttagaaatatacagactctatcgtgtgtctatatcttctttttatatccaatgtatttatgtctgatttttcttcatttatcatatataatggtccaaattctacacgtgcttcggattcatccagatcattaaggttcttataattgtaacatccttctcttccctcttctacatcttccttcttattcttattcttagcgtcacagaatctaccacagcaggatcccatgacgagcgtcatattaaactaatccattttcaattataatatacgattagtaatgaccattaaaataaaaatattcttcataaccggcaagaaagtgaaaagttcacattgaaactatgtcagtagtatacatcatgaaatgatgatatatatatactctattttggtggaggattatatgatataattcgtggataatcattcttaagacacatttcttcattcgtaaatcttttcacgttaaatgagtgtccatattttgcaatttcttcatatgatggcggtgtacgtggacgaggctgctcctgttcttgttgtagtcgccgactgtcgtgtctgcgtttagatccctccattatcgcgattgcgtagatggagtactattttataccttgtaattaaatttttttattaattaaacgtataaaaacgttccgtatctgtatttaagagccagatttcgtctaatagaacaaatagctacagtaaaaataactagaataattgctacacccactagaaaccacggatcgtaatacggcaatcggttttcgataataggtggaacgtatattttatttaaggacttaacaattgtctgtaaaccacaatttgcttccgcggatcctgtattaactatctgtaaaagcatatgttgaccgggcggagccgaacattctccgatatccaatttctgtatatctataatattattaacctccgcatacgcattacagttcttttctagcttggataccgcactaggtacatcgtctagatctattcctatttcctcagcgatagctcttctatccttttccggaagcaatgaaatcacttcaataaatgattcaaccatgagtgtgaaactaagtcgagaattactcatgcatttgttagttattcggagcgcgcaatttttaaactgtcctataacctctcctatatgaatagcacaagtgacattagtagggatagaatgttgagctaatttttgtaaataactatctataaaaagattatacaaagttttaaactctttagtttccgccatttatccagtctgagaaaatgtctctcataataaatttttccaagaaactaattgggtgaagaatggaaacctttaatctatatttatcacagtctgttttggtacacatgatgaattcttccaatgccgtactaaattcgatatctttttcgatttctggatatgtttttaataaagtatgaacaaagaaatggaaatcgtaataccagttatgtttaactttgaaattgttttttattttcttgttaatgattccagccacttgggaaaagtcaaagtcgtttaatgccgatttaatacgttcattaaaaacaaactttttatcctttagatgaattattattggttcattggaatcaaaaagtaagatattatcgggtttaagatctgcgtgtaaaaagttgtcgcagcatggtagttcgtaaattttaatgtataacagagccatctgtaaaaagataaactttatgtattgtaccaaagatttaaatcctaatttgatagctagctcggtatctactttatctgccgaatacagtgctaggggaaaaattataatatttcctctttcgtattcgtagttagttctcttttcatgttcgaaaaagtgaaacatgcggttaaaatagtttataacattaatattactgttaataactgccggataaaagtgggatagtaatttcacgaatttgatactgtcctttctctcgttaaacgcctttaaaaaaactttagaagaatatctcaatgatagttcctgaccatccatagtttgtatcaataatagcaacatatgaagaacacgtttatacagagtatgtaaaaatgttaatttatagtttaatcccatggcccacgcacacacgattaattttttttcatctccctttagattgttgtatagaaatttgggtactgtgaactccgccgtagtttccatgggactatataattttgtggcctcgaatacaaattttactacatagttatctatcttaaagactataccatatcctcctgtagatatgtgataaaaatcgtcgtttataggataaaatcgtttatccttttgttggaaaaaggatgaattaatgtaatcattctcttctatctttagtagtgtttccttattaaaattcttaaaataatttaacaatctaactgatggagcccaattttggtgtaaatctaattgggacattatattgttaaaatacaaacagtctcctaatataacagtatctgataatctatggggagacatccattgatattcaggggatgaatcattggcaacacccatttattgtacaaaaagccccaatttacaaacgaaagtccaggtttgatagagacaaactattaactattttgtctctgtttttaatttctttggtaatgaaattattcacaatatcagtatcttctttatctaccagagattttactaacttgataaccttggctgtctcattcaatagggtagtaatatttgtatgtgtgatattgatatcttttagaagtgattctttgatggtgccagcatacgaattacaataatgcagaaactcggttaacatgcaggaattatagtaagccaattccaattgttgcctgtgttgtattagagtgtcaatatgagcaatggtgtccttgcgtttctctgatagaatgcgagcagcgattttggcgttatcatttgacgatatttctggaatgacgaatcctgtttctactaactttttggtaggacaaagtgaaacaatcaagaagatagcttctcctcctatttgtggaagaaattgaactcctctagatgatctccttgacagatattggaccgaattacagaagtacctggaatgtaaagccctgaaaccccctcattttttaagcagattgttgccgtaaatcctgcactatgcccaagatagagagctcctttggtgaatccatctctatgtttcagtttaaccaagaaacagtcagctggtctaaaatttccatctctatctaatacagcatctaacttgatgtcaggaactatgaccggttatgttatatgtaacattgagtaaatccttaagttcataatcatcactgtcatcagttatgtacgatccaaacaatgtttctactggcatagtggatacgaagatgctatccatcagaatgtttccctgattagtattttctatatagctattcttctttaaacgattttccaaatcagtaactatgttcatttttttaggagtaggacgcctagccagtatggaagaggattttctagatcctctcttcaacatctttgatctcaatggaatgcaaaaccccatagtgtaacaaccaacgataaaaataatattgtttttcactttttataattttaccatctgactcatggattcattaatatctttataagagctactaacgtataattctttataactgaactgagatatatacaccggatctatggtttccataattgagtaaatgaatgctcggcaataactaatggcaaatgtataaaacaacgaaattatactagagttgttaaagttaatattttctatgagctgttccaataaattatttgttgtaactgcgttcaagtcataaatcatcttgatactatccagtaaaccgtttttaagttctggaatattattatcccattgtaaagcccctaattcgactatcgaatatcctgctctgatagcagtttcaatatcgacggacgtcaatactgtaataaaggtggtagtattgtcatcatcgtgataaactactggaatatggtcgttagtaggtacggtaactttacacaacgcgatatataactttccttttgtaccatttttaacgtagttgggacgtcctgcagggtattgttttgaagaaatgatatcgagaacagatttgatacgatatttgttggattcctgattatttactataatataatctagacagatagatgattcgataaatagagaaggtatatcgttggtaggataatacatccccattccagtattctcggatactctattaatgacactagttaagaacatgtcttctattctagaaaacgaaaacatcctacatggactcattaaaacttctaacgctcctgattgtgtctcgaatgcctcgtacaaggatttcaaggatgccatagattctttgaccaacgatttagaattgcgtttagcatctgatttttttattaaatcgaatggtcggctctctggtttgctaccccaatgataacaatagtcttgtaaagataaaccgcaagaaaatttatacgcatccatccaaataaccctagcaccatcggatgatattaatgtattattatagattttccatccacagttattgggccagtatactgttagcaacggtatatcgaatagattactcatgtaacctactagaatgatagttcgtgtactagtcataatatctttaatccaatctaagaaatttaaaattagattttttacactgttaaagttaacaaaggtattacccggatacgtggatatcatatatggtattggtccattatcagtaatagctccataaactgatacggcgatggtttttatatgtgtttgatctaacgaggaagaaattcgcgcccacaattcatctctagatatgtatttaatatcaaacggtaacacatcaatttcgggacgcgtatatgtttctaaatttttaatccaaatataatgatgacctatatgccctattatcatactgtcaactatagtacacctagagaacttacgatacatctgtttcctataatcgttaaattttacaaatctataacatgctaaaccttttgacgacaaccattcattaatttctgatatggaatctgtattctcaataccgtatcgttctaaagccagtgctatatctccctgttcgtgagaacgctttcgtataatatcgatcaacggataatctgaagtttttggagaataatatgactcatgatctatttcgtccataaacaatctagacataggaattggaggcgatgatcttaattttgtgcaatgagtcgtcaatcctataacttctaatattgtaatattcatcatcgacataacactatctatgttatcatcgtatattagtataccatgaccttcttcatttcgtgccaaaatgatatacagtcttaaatagttacgcaatatctcaatagtttcataattgttagctgttttcatcaaggtttgtatcctgtttaacatgatggcgttctatacgtttctattttttaaatttttaacgatttactgtggctagatacccaatctctctcaaatatttttttagcctcgcttacaagctgtttatctatactattaaaactgacgaatccgtgattttggtaatgggttccgtcgaaatttgccgaagtgatatgaacatattcgtcgtcgactatcaacaattttgtattattctgaatagtgaaaaccttcacagatagatcattttgaacacacaacgcgtctagacttctggcggttgccatagaatatacgtcgttcttatcccaattaccaactagaagtctgatcttaactcctctattaatggctgcttctataatggagttgtaaatgtcgggccaatagtagctattaccgtcgacacgtgtagtgggaactatggccaaatgttcaatatctatactagtcttagccgacttgagtttatcaataactacatcagtgtctagatctctagaatatcccaataggtgttccggagaatcagtaaagaacactccacctataggattcttaatatgatacgcagtgctaactggcagacaacaagccgcagagcataaattcaaccatgaattttttgcgctattaaaggctttaaaagtatcaaatcttctacgaagatctgtggccagcgggggataatcagaatatacacctaacgttttaatcgtatgtatagatcctccagtaaatgacgcgtttcctacataacatctttcattatctgacacccaaaaacaaccgagtagtagtcccacattattttttttatctatattaacggttataaaatttatatccgggcagtgactttgtagctctcccagatttcttttccctcgttcatctagcaaaactattattttaatccctttttcagatgcctcttttagtttatcaaaaataagcgctcccctagtcgtactcagaggattacaacaaaaagatgctatgtatatatatttcttagctagagtgataatttcgttaaaacattcaaatgttgttaaatgatcggatctaaaatccatattttctggtagtgtttctaccagcctacattttgctcccgcaggtaccggtgcaaatggccacatttagttaacataaaaacttatacatcctgttctatcaacgattctagaatatcatcggctatatcgctaaaattttcatcaaagtcgacatcacaacctaactcagtcaatatattaagaagttccatgatgtcatcttcgtctatttctatatccgtatccattgtagattgttgaccgattatcgagtttaaatcattactaatactcaatccttcagaatacaatctgtgtttcattgtaaatttataggcggtgtatttaagttggtagattttcaattatgtatcaatatagcaacagtagttcttgctcctccttgattctagcatcctcttcattattttcttctacgtacataaacatgtccaatacgttagacaacacaccgacgatggcggccgccacagacacgaatatgactaaaccgatgaccatttaaaaacccctctctagctttcacttaaactgtatcgattattcttttagaacatgtataatataaaaacattattctatttcgaatttaggcttccaaaaatttttcatccgtaaaccgataataatatatatagacttgttaatagtcggaataaatagattaatgcttaaactatcatcatctccacgattagagatacaatatttacattttttttgctgtttcgaaactttatcaatacacgttaatacaaacccaggaaggagatattgaaactgaggctgttgaaaatgaaacggtgaatacaataattcagataatgtaaaatcatgattccgtattctgatgatattagaactgctaatggatgtcgatggtatgtatctaggagtatctattttaacaaagcatcgatttgctaatatacaattatcattttgattaattgttattttattcatattcttaaaaggtttcatatttatcaattcttctacattaaaaatttccatttttaatttatgtagccccgcaatactcctcattacgtttcattttttgtctataatatccattttgttcatctcggtacatagattatccaattgagaagcgcatttagtagttttgtacattttaagtttattgacgaatcgtcgaaaactagttatagttaacattttattatttgataccctgatattaatacccctgccgttactattatttataactgatgtaatccacgtaacattggaattaactatcgatagtaatgcatcgacgcttccaaaattgtctattataaactcaccgataatttttttattacatgttttcatattcattaggattattaaatctttaatcttactacgattgtatgcgttgatattgcaagacgtcattctaaaagacggaggatctccatcaaatgccagacaatcacgtacaaagtacatggaaataggttttgttctattgcgcatcatagatttatatagaacacccgtagaaatactaatttgttttactctataaaatactaatgcatctatttcatcgttttgtataacgtctttccaagtgtcaaattccaaatttttttcattgatagtaccaaattcttctatctctttaactacttgcatagataggtaattacagtgatgcctacatgccgttttttgaaactgaatagatgcgtctagaagcgatgctacgctagtcacaatcaccactttcatatttagaatatatatatgtaaaaatatagtagaatttcattttgttttttttctatgctataaatgaattctcattttgcatctgctcatactccgttttatatcaataccaaagaaggaagatatctggttctaaaagccgttaaagtatgcgatgttagaactgtagaatgcgaaggaagtaaagcttcctgcgtactcaaagtagataaaccctcatcacccgcgtgtgagagaagaccttcgtccccttccagatgcgagagaatgaataacccaggaaaacaagttccgtttatgaggacggacatgctacaaaatatgttcgcggctaatcgcgataatgtagcttctagacttttgtcctaaaatacaattatatccttttcgatattaataaatccgtgtcgtccaggttttttatctctttcagtatgtgaatagataggtattttatctctattcatcatcgaatttaagagatccgataaacattgtttgtattctccagatgtcagcatctgatacaacaatatatgtgcacataaacctctggcacttatttcatgtaccttccccttatcactaaggagaatagtatttgagaaatatgtatacatgatattatcatgaattagatatacagaatttgtaacactctcgaaatcacacgatgtgtcggcgttaagatctaatatatcactcgataacacattttcatctagatacactagacattttttaaagctaaaatagtctttagtagtaacagtaactatgcgattattttcatcgatgatacatttcatcggcatattattacgcttaccatcaaagactataccatgtgtatatctaacgtattctagcatggttgccatacgcgcattaaacttttcaggatctttggatagatcttccaatctatctatttgagaaaacatttttatcatgttcaatagttgaaacgtcggatccactatatagatattatctataaagattttaggaactacgttcatggtatcctggcgaatattaaaactatcaatgatatgattatcgttttcatcttttatcaccatatagtttctaagatatgggattttacttaatataatattatttcccgtaataaattttattagaaatgccaaatctataagaaaagtcctcgaattagtttgaagaatatctatatcgccgtaccgtatatttggattaattagatatagagaatatgatccgtaacatatacaacttttattatggcgtctaagatattcttccatcaacttattaacatttttgactagggaagatacattatgacgtcccattacttttgccttgtctattactgcgacgttcatagaatttagcatatctcttgccaattcttccattgatgttacattataagaaattttagatgaaattacatttggagctttaatagtaagaactcctaatatgtccgtgtatgtggtcactaatacagattgtagttctataatcgtaaataatttacctatattatatgtttgagtctgtttagaaaagtagctaagtatacgatcttttatttctgatgcagatgtatcaacatcggaaaaaaatctttttttattcttttttactaaagatacaaatatgtctttgttaaaaacagttattttctgaatatttctagcttgtaattttaacatatgatattcgttcacactaggtactctgcctaaataggtttctataatctttaatgtaatattaggaaaagtattctgatcaggattcctattcattttgaggatttaaaactctgattattgtctaatatggtctcaacacaaactttttcacagagcgatagagtttttgataactcgtttttcttaagaaatataaaactactgtctccagagctcgctctatcttttattttatttaattcgatacaaactcctgatactggttcagaaagtaattcattaattttcagtcctttatagaagatatttaatatagataatacaaaatcttcagtttttgatatcgatctgattgatcctagaactagatatattaataacgtgctcattaggcagtttatggcagcttgataattagatatagtatattccagttcatatttattagataccgcattgcccagattttgatattctatgaattcctctgaaaataaatccaaaataactagacattctattttttgtggattagtgtactctcttccctctatcatgttcactactggtgtccacgatgataaatatctagagggaatataatatagtccataggatgccaatctagcaatgtcgaataactgtaattttattcttcgctcttcattatgaattgattcttgaggtataaacctaacacaaattatattattagacttttcgtatgtaatgtctttcatgttataagtttttaatcctggaatagaatctattttaatgaggcttttaaacgcagagttctccaacgagtcaaagcataatactctgttggttttcttatatacgatgttacgattttcttctttgaatggaataggtttttgaattagtttataattacaacataatagataaggaagtgtgcaaatagtacgcggaaaaaacataatagctcccctgttttcatccatggttttaagtaaatgatcactggcttctttagtcaatggatattcgaacattaaccgtttcatcatcattggacagaatccatatttcttaatgtaaagagtgatcaaatcattgtgtttattgtaccatcttgttgtaaatgtgtattcggttatcggatctgctcctttttctattaaagtatcgatgtcgatctcgtctaagaattcaactatatcgacatatttcatttgtatacacataaccattactaacgtagaatgtataggaagagatgtaacgggaacagggtttgttgattcgcaaactattctaatacataattcttctgttaatacgtcttgcacgtaatctattatagatgccaagatatctatataattattttgtaagatgatgttaactatgtgatctatataagtagtgtaataattcatgtatttcgatatatgttccaactctgtctttgtgatgtctagtttcgtaatatctatagcatcctcaaaaaatatattcgcatatattcccaagtcttcagttctatcttctaaaaaatcttcaacgtatggaatataataatctattttacctcttctgatatcattaatgatatagtttttgacactatcttctgtcaattgattcttattcactatatctaagaaacggatagcgtccctaggacgaactactgccattaatatctctattatagcttctggacataattcatctattataccagaattaatgggaactattccgtatctatctaacatagttttaagaaagtcagaatctaagacctgatgttcatatattggttcatacatgaaatgatctctattgatgatagtgactatttcattctctgaaaattggtaactcattctatatatgctttccttgttgatgaaggatagaatatactcaatagaatttgtaccaacaaactgttctcttatgaatcgtatatcatcatctgaaataatcatgtaaggcatacatttaacaattagagacttgtctcctgttatcaatatactattcttgtgataatttatgtgtgaggcaaatttgtccacgttctttaattttgttatagtagatatcaaatccaatggagctacagttcttggcttaaacagatatagtttttctggaacgaattctacaacattattataaaggactttgggtagataagtgggatgaaatcctattttaattaatgcgatagccttgtcctcgtgcagatatccaaacgcttttgtgatagtatggcattcattgtctagaaacgctctacgaatatctgtgacagatatcatctttagagaatatactagtcgcgttaatagtactacaatttgtattttttaatctatctcaataaaaaaattaatatgtatgattcaatgtataactaaactactaactgttattgataactagaatcagaatctaatgatgacgtaaccaagaagtttatctactgccaatttagctgcattatttttagcatctcgtttagattttccatctgccttatcgaatactcttccgtcgatatctacacaggcataaaatgtaggagagttactaggccccactgattcaatacgaaaagaccaatctctcttagttatttggcagtactcattaataatggtgacagggttagcatctttccaatcaataatttttttagccggaataacatcatcaaaagacttatgatcctctctcattgatttttcgcgggatacatcatctattatggcgtcagccataacatcagcatccggcttatccgcctccgttgtcataaaccaacgaggaggaatatcgtcggagctgtacaccatagcactacgttgaagatcgtacagagctttattaacttctcgcttctccatattaagttgtctagttagttgtgcagcagtagctccttcgattccaatgtttttaatagccgcacacacaatctctgcgtcagaacgctcgtcaatatagatcttagacatttttagagagaactaacacaaccagcaataaaactaatttattttatcatttttttattcatcatcctctggtggttcgtcgtttctatcgaatgtggatctgattaacccgtcatctataggtgatgctggttctggagattctggaggagatggattattatctggaagaatctctgttatttccttgttttcatgtatcgattgcgttgtaacattaagattgcgaaatgctctaaatttgggaggcttaaagtgttgtttgcaatctctacacgcatgtctaactagtggaggttcgtcagcggctctagtttgaatcatcatcggcgtagtattcctacttttacagttaggacacggtgtattgtatttctcgtcgagaacgttaaaataatcgttgtaactcacatcctttattttatctatattgtattctactcctttcttaatgcattttataccgaataagagatagcgaaggaattctttttcggtgccgctagtacccttaatcatatcacatagtgttttatattccaaatttgtggcaatagacggtttatttctatacgatagtttgtttctggaatcctttgagtattctataccaatattattctttgattcgaatttagtttcttcgatattagattttgtattacctatattcttgatgtagtactttgatgatttttccatggcccattctattaagtcttccaagttggcatcatccacatattgtgatagtaattctcggatatcagtagcggctaccgccattgatgtttgttcattggatgagtaactactaatgtatacattttccatttataacacttatgtattaactttgttcatttatattttttcattattatgttgatattaacaaaagtgaatatatatgttaataattgtattgtggttatacggctacaatttcataatgagtggaagtcagtgtccgatgatcaatgacgatagctttactctgaaaagaaagtatcaaatcgatagtgcggagtcaacaataaaaatggataagaagaggataaagtttcagaatagagccaaaatggtaaaagaaataaatcagacaataagagcagcacaaactcattacgagacattgaaactaggatacataaaatttaagagaatgattaggactactactctagaagatatagcaccatctattccaaataatcagaaaacttataaactattctcggacatttcagccatcggcaaagcatcacagaatccgagtaagatggtatatgctctgctgctttacatgtttcccaatttgtttggagatgatcatagattcattcgttatagaatgcatccaatgagtaaaatcaaacacaagatcttctctcctttcaaacttaatcttattagaatattagtggaagaaagattctataataatgaatgcagatctaataaatggagaataattggaacacaagttgataaaatgttgatagctgaatctgataaatatacaatagatgcaaggtataacctaaaacccatgtatagaatcaagggaaaatctgaagaagataccctctttatcaaacagatggtagaacaatgtgtgacatcccaggaattggtggaaaaagtgttgaagatactgtttagagatttgttcaagagtggagaatacaaagcgtacagatacgatgatgatgtagaaaatggatttattggattggatacactaaaattaaacattgttcatgatatagttgaaccatgtatgcctgttcgtaggccagtggctaagatactgtgtaaagaaatggtaaataaatactttgagaatccgctacatattattggtaaaaatcttcaagagtgcattgactttgttagtgaataggcatttcatctttctccaatactaattcaaattgttaaattaataatggatagtataaatagttattagtgataaaatagtaaaaataattattagaataagagtgtagtatcatagataactctcttctataaaaatggattttattcgtagaaagtatcttatatacacagtagaaaataatatagattttttaaaggatgatacattaagtaaagtaaacaattttaccctcaatcatgtactagctctcaagtatctagttagcaattttcctcaacacgttattactaaggatgtattagctaataccaatttttttgttttcatacatatggtacgatgttgtaaagtgtacgaagcggttttacgacacgcatttgatgcacccacgttgtacgttaaagcattgactaagaattatttatcgtttagtaacgcaatacaatcgtacaaggaaaccgtgcataaactaacacaagatgaaaaatttttagaggttgccgaatacatggacgaattaggagaacttataggcgtaaattatgacttagttcttaatccattatttcacggaggggaacccatcaaagatatggaaatcatttttttaaaactgtttaagaaaacagacttcaaagttgttaaaaaattaagtgttataagattacttatttgggcttacctaagcaagaaagatacaggcatagagtttgcggataatgatagacaagatatatacactctatttcaacaaactggtagaatagtccatagcaatctaacagaaacgtttagagattatatctttcccggagataagactagctattgggtgtggttaaacgaaagtatagctaatgatgcggatattgttcttaatagacacgccattaccatgtatgataaaattcttagttatatatactctgagataaaacaaggacgcgttaataaaaacatgcttaagttagtttatatctttgagcctgaaaaagatatcagagaacttctgctagaaatcatatatgatattcctggagatatcctatctattattgatgcaaaaaacgacgattggaaaaaatattttattagtttttataaagctaattttattaacggtaatacatttattagtgatagaacgtttaacgaggacttattcagagttgttgttcaaatagatcccgaatatttcgataatgaacgaattatgtctttattctctacgagtgctgcggacattaaacgatttgatgagttagatattaataacagttatatatctaatataatttatgaggtgaacgatatcacattagatacaatggatgatatgaagaagtgtcaaatctttaacgaggatacgtcgtattatgttaaggaatacaatacatacctgtttttgcacgagtcggatcccatggtcatagagaacggaatactaaagaaactgtcatctataaaatccaagagtagacggctgaacttgtttagcaaaaacattttaaaatattatttagacggacaattggctcgtctaggtcttgtgttagatgattataaaggagacttgttagttaaaatgataaaccatcttaagtctgtggaggatgtatccgcattcgttcgattttctacagataaaaaccctagtattcttccatcgctaatcaaaactattttagctagttataatatttccatcatcgtcttatttcaaaggtttttgagagataatctatatcatgtagaagaattcttggataaaagcatccatctaaccaagacggataagaaatatatacttcaattgataagacacggtagatcatagaacagaccaaatatattattaataatttgtatatacatagatataattatcacacatttttgataaatgggaactgctgcaacaattcagactcccaccaaattaatgaataaagaaaatgcagaaatgattttggaaaaaattgttgatcatatagttatgtatattagtgacgaatcaagtgattcagaaaataatcctgaatatattgattttcgtaacagatacgaagactatagatctctcattataaaaagtgatcacgagtttgtaaagctatgtaaaaatcatgcagagaaaagttctccagaaacgcaacaaatgattatcaaacacatatacgaacaatatcttattccagtatctgaagtactattaaaacctataatgtccatgggtgacataattacatataacggatgtaaagacaatgaatggatgctagaacaactctctaccctaaactttaacaatctccgcacatggaactcatgtagcataggcaatgtaacgcgtctgttttatacattttttagttatctgatgaaagataaactaaatatataagtataatcccattctaatactttaacctgatgtattacctgcatcttattagaatattaacctaactaaaagacataacatagttgataaaaagcggtaggatataaatattatggctgccaccgttccgcgttttgacgacgtgtacaaaaatgcacaaagaagaattctagatcaagaaacattttttagtagaggtctaagtagaccgttaatgaaaaacacatatctatttgataattacgcgtatggatggataccagaaactgcaatttggagtagtagatacgcaaacttagatgcaagtgactattatcccatttcgttgggattacttaaaaagttcgagtttctcatgtctctatataaaggtcctattcccgtatatgaagaaaaagtaaatactgaattcattgctaatggatcgttctctggtagatacgtatcatatcttcgaaagttttctgcccttccaacaaacgagtttattagttttttgttactgacttccattccaatctataatatcttgttctggtttaaaaatactcagtttgatattactaaacacacattattcagatacgtctatacagataatgccaaacacctggcgttggctaggtatatgcatcaaacaggagactataagcctttgtttagtcgtctcaaagagaattatatatttaccggtcccgttccaataagtatcaaagatatagatcaccctaatcttagtagagcaagaagtccatccgattatgagacattagctaatattagtactatattgtactttaccaagtatgatccggtattaatgtttttattgttttacgtacctgggtattcaattactacaaaaattactccagccgtagaatatctaatggataaactgaatctaacaaagagcgacgtacaactgttgtaaattattttatgcttcgtaaaatgtaggttttgaaccaaacattctttcaaagaatgagatgcataaaactttattatccaatagattgactatttcggacgtcaatcgtttaaagtaaacttcgtaaaatattctttgatcactgccgagtttaaaacttctatcgataattgtttcatatgttttaatatttacaagttttttggtccatggtacattagccggacaaatatatgcaaaataatatcgttctccaagttctatagtttctggattatttttattatattcagtaaccaaatacatattagggttatctgcggatttataatttgagtgatgcattcgactcaacataaataattctagaggagacgatctactatcaaattcggatcgtaaatctgtttctaaagaacggagaatatctatacatacctgattagaattcatccgtccttcagacaacatctcagacagtctggtcttgtatgtcttaatcatattcttatgaaacttggaaacatctcttctagtttcactagtacctttattaattctctcaggtacagattttgaattcgacgatgctgagtatttcatcgttgtatatttcttcttcgattgcataatcagattcttatataccgcctcaaactctattttaaaattattaaacaatactctattattaatcagtcgttctaactctttcgctatttctatagacttatcgacatcttgactgtctatctctgtaaacacggagtcggtatctccatacacgctacgaaaacgaaatctgtaatctataggcaacgatgttttcacaatcggattaatatctctatcgtccatataaaatggattacttaatggattggcaaaccgtaacataccgttagataactctgctccatttagtaccgattctagatacaagatcattctacgtcctatggatgtgcaactcttagccgaagcgtatgagtatagagcactatttctaaatcccatcagaccatatactgagttggctactatcttgtacgtatattgcatggaatcatagatggccttttcagttgaactggtagcctgttttagcatctttttatatctggctctctctgccaaaaatgttcttaatagtctaggaatggttccttctatcgatctatcgaaaattgctatttcagagatgaggttcggtagtctaggttcacaatgaaccgtaatatatctaggaggtggatatttctgaagcaagagctgattatttatttcttcttccaatctattggtactaacaacgacaccgactaatgtttccggagatagatttccaaagatacacacattaggatacagactgttataatcaaagattaatacattattactaaacattttttgttttggagcaaataccttaccgccttcataaggaaacttttgttttgtttctgatctaactaagatagttttagtttccaacaatagctttaacagtggacccttgatgactgtactcgctctatattcgaataccatggattgaggaagcacatatgttgacgcacccgcgtctgtttttgtttctactccataatactcccacaaatactgacacaaacaagcatcatgaatacagtatctagccatatctaaagctatgtttagattataatccttatacatctgagctaaatcaacgtcatcctttccgaaagataatttatatgtatcattaggtaaagtaggacatgatagtacgactttaaatccattttcccaaatatctttacgaattactttacatataatatcctcatcaacagtcacataattacctgtggttaaaacctttgcaaatgcagcggctttgcctttcgcgtccgtagtatcgtcaccgatgaacgtcatttctctaactcctctatttaatactttacccatgcaactgaacgcgttcttggatatagaatccaatttgtacgaatccaatttttcagatttttgaatgaatgaatatagatcgaaaaatatagttccattattgttattaacgtgaaacgtagtattggccatgccgcctactcccttatgactagactgatttctctcataaatacagagatgtacagcttcctttttgtccggagatctaaagataatcttctctcctgttaataactctagacgattagtaatatatctcagatcaaagttatgtccgttaaaggtaacgacgtagtcgaacgttagttccaacaattgtttagctattcgtaacaaaactatttcagaacatagaactagttctcgttcgtaatccatttccattagtgactgtatcctcaaacatcctctatcgacggcttcttgtatttcctgttccgttaacatctcttcattaatgagcgtaaacaataatcgtttaccacttaaatcgatataacagtaacttgtatgcgagattgggttaataaatacagaaggaaacttcttatcgaagtgacactctatatctagaaataagtacgatcttgggatatcgaatctaggtatttttttagcgaaacagttacgtggatcgtcacaatgataacatccattgttaatctttgtcaaatattgctcgtccaacgagtaacatccgtctggagatatcccgttagaaatataaaaccaactaatattgagaaattcatccatggtggcattttgtatgctgcgtttctttggctcttctatcaaccacatatctgcgacggagcattttctatctttaatatctagattataacttattgtctcgtcaatgtctatagttctcatctttcccaacggcctcgcattaaatggaggaggagacaatgactgatatatttcgtccgtaactacgtaataaaagtaatgaggaaatcgtataaatacggtctcgccatttcgacatctggatttcagatataaaaatctgttttcaccgtgactttcaaaccaattaatgcaccgaacatccatttatagaatttagaaatatattttcatttaaatgaatcccaaacattggggaagagccgtatggaccattatttttatagtactttcgcaagcgggtttagacggcaacatagaagcgtgtaaacgaaaactatatactatagtcagcactcttccatgtcctgcatgtagacggcacgcgactatcgctatagaggacaataatgtcatgtctagcgatgatctgaattatatttattattttttcatcagattatttaacaatttggcatctgatcccaaatacgcgatcgatgtgacaaaggttaaccctttataaacttaacccattataaaacttatgattagtcacgactgaaataaccgcgtgattattttttggtataattctacacggcatggtttctgtaactatgaattcaacccccgttacattagtgaaatctttaacaaacagcaagggttcgtcaaagacataaaactcattgtttacaatcgaaatagaccccctatcacacttaaaataaaaaatatccttatcctttaccaccaaataaaattctgattggtcaatgtgaatgtattcacttaacagttccacaaatttatttattaactccgaggcacatacatcgtcggtattttttatggcaaactttactcttccagcatccgtttctaaaaaaatattaacgagttccatttatatcatccaatattattgaaatgacgttgatggacagatgatacaaataagaaggtacggtacctttgtccaccatctcctccaattcatgctctattttgtcattaactttaatgtatgaaaacagtacgccacatgcttccatgacagtgtgtaacactttggatacaaaatgtttgacattagtataattgtccaagactgtcaatctataatagatagtagctataatatattctatgatggtattgaagaagatgacaatcttggcatattgatcatttaacacagacatggtatcaacagatagcttgaatgaaagagaatcagtaattggaataagcgtcttctcgatagagtgtccgtataccaacatgtctgatattttgatgtattccattaaattatttagttttttctttttattctcgttaaacagcatttctgtcaacggaccccaacatcgttgaccgattaagttttgattgatttttccgtgtaaggcgtatctagtcagatcgtatagcctatccaataatccatcatctgtgcgtagatcacatcgtacactttttaattctctatagaagagcgacagacagcaatttctttattctctacagatgtaagatacttgaagacattcctatgatgatgcagaattttggataacacggtattgatggtatctgttaccataattcctttgatggctgatagtgtcagagcacaagatttccaatctttgttttgatatctatatcagacagcatggtgcgtctgacaacacaaggattaagacggaaagatgaaatgattctctcaacatcttcaatggataccttgctattttttctggcattatctatatgtgcgagaatatcctctagagaatcagtatcctttttgatgatagtggatctcaatgacatgggacgtctaaaccttcttattctatcaccagattgcatggtgatttgtcttctttcttttatcataatgtaatctctaaattcatcggcaaattgtctatatctaaaatcataatatgagatgtttacctctacaaatatctgttcgtccaatgttagagtatctacatcagttttgtattccaaattaaacatggcaacggatttaattttatattcctctattaagtcctcgtcgataataacagaatgtagataatcatttaatccatcgtacatggttggaagatgcttgttgacaaaatctttaattgtcttgatgaaggtgggactatatctaacatcttgattaataaaatttataacattgtccataggatactttgtaactagttttatacacatctcttcatcggtaagtttagacagaatatcgtgaacaggtggtatattatattcatcagatatacgaagaacaatgtccaaatctatattgtttaatatattatatagatgtagcgtagctcctacaggaatatctttaactaagtcaatgatttcatcaaccgttagatctattttaaagttaatcatataggcattgatttttaaaaggtatgtagccttgactacattctcattaattaaccattccaagtcactgtgtgtaagaagattatattctatcataagcttgactacatttggtcccgataccattaaagaattcttatgatataaggaaacagattttaggtactcatctactctacaagaattttggagagccttaacgatatcagtgacgtttattatttcaggaggaaagaatctaacattgagaatatcggaattaatagcttccagatacagtgattttggcaatagtccgtgtaatccataatccagtaacacgagctggtgcttgctagacaccttttcaatgtttaatttttttgaaataagctttgataaagccttcctcgcaaattccggatacatgaacatgtcggcgacatgattaagtattgttttttcattattttctcaacaagttctcaataccccaatagatgatagaatatcacccaatgcgtccatgttgtctatttccaacaggtcgctatatccaccaatagaagtttttccaaaaaagattctaggaacagttctaccaccagtaatttgttcaaaatagtcacgcaattcattttcgggtttaaattctttaatatcgacaatttcatacgctcctcttttgaaactaaacttatttagaatatccagtgcatttctacaaaaaggacatgtatacttgacaaaaattgtcactttgttattggccaacctttgttgtacaaattcctcggccattttaatatttaagtgatataaaactatctcgacttatttaactctttagtcgagatatatggacgcagatagctatatgatagccaactacagaaggcaaacgctataaaaaacataattacgacgagcatatttataaatatttttattcagcattacttgatatagtaatattaggcacagtcaaacattcaaccactctcgatacattaactctctcattttctttaacaaattctacaatatcttcgtaaaaagattcttgaaactttttagaatatctatcgactctagatgaaatagcgttcgtcaacatactatgttttgtatacataaaggcgcccattttaacagtttctagtgacaaaatgctagcgatcctaggatcctttagaatcacatagattgacgattcgtctctcttagtaactctagtaaaataatcatacaatctagtacgcgaaataatattatccttgacttgaggagatctaaacaatctagttttgagaacatcgataagttcatcgggaatgacatacatactatctttaatagaactcttttcatccagttgaatggattcgtccttaaccaactgattaatgagatcttctattttatcattttccagatgatatgtatgtccattaaagttaaattgtgtagcgcttctttttagtctagcagccaatactttaacatcactaatatcgatatacaaaggagatgatttatctatggtattaagaattcgtttttcgacatctgtcaaaaccaattcctttttgcctgtatcatccagttttccatcctttgtaaagaaattattttctactagactattaataagactgataaggattcctccataattgcacaatccaaactttttaacaaaactagactttacaagatctacaggaatgcgtaattcaggtttcttagcttgtgattttttcttttgtggacattttcttgtgaccaactcatctaccatttcattgattttagcagtgaaataagctttcaatgcacgggcactgatactattgaaaacgagttgatcttcaaattccgccatttaagttcaccaaacaacttttaaatacaaatatatcaatagtagtagaataagaactataaaaaaaataataattaaccaataccaaccccaacaaccggtattattagttgatgtgactgttttctcatcacttagaacagatttaacaatttctataaagtctgtcaaatcatcttccggagaccccataaatacaccaaatatagcggcgtacaacttatccatttatacattgaatattggcttttctttatcgctatcttcatcatattcatcatcaatatcaacaagtcccagattacgagccagatcttcttctacattttcagtcattgatacacgttcactatctccagagagtccgataacgttagccaccacttctctatcaatgattagtttcttgagtgcgaatgtaatttttgtttccgttccggatctatagaagacgataggtgtgataattgccttggccaattgtctttctcttttactgagtgattctagttcaccttctatagatctgagaatggatgattctccagtcgaaacatattctaccatggatccgtttaatttgttgatgaagatggattcatccttaaatgttttctctgtaatagtttccaccgaaagactatgcaaagaatttggaatgcgttccttgtgcttaatgtttccatagacggcttctagaagttgatacaacataggactagccgcggtaacttttatttttagaaagtatccatcgcttctatcttgtttagatttatttttataaagtttagtctctccttccaacataataaaagtggaagtcatttgactagataaactatcagtaagttttatagagatagacgaacaattagcgtattgagaagcatttagtgtaacgtattcgatacattttgcattagatttactaatcgattttgcatactctataacacccgcacaagtctgtagagaatcgctagatgcagtaggtcttggtgaagtttcaactctcttcttgattaccttactcatgattaaacctaaataattgtactttgtaatataatgatatatattttcactttatctcatttgagaataaaaatgtttttgtttaaccactgcatgatgtacagatttcggaatcgcaaaccaccagtggttttattttatccttgtccaatgtgaattgaatgggagcggatgcgggtttcgtacgtagatagtacattcccgtttttagaccgagactccatccgtaaaaatgcatactcgttagtttggaataactcggatctgctatatggatattcatagattgactttgatcgatgaaggctcccctgtctgcagccatttttatgatcgtcttttgtggaatttcccaaatagttttataaactcgcttaatatcttctggaaggtttgtattctgaatggatccaccatctgccataatcctattcttgatctcatcattccataattttctctcggttaaaactctaaggagatgcggattaactacttgaaattctccagacaatactctccgagtgtaaatattactggtatacggttccaccgactcattatttcccaaaatttgagcagttgatgcagtcggcataggtgccaccaataaactatttctaagaccgtatgttctgattttatcttttagaggttcccaattccaaagatccgacggtacaacattccaaagatcatattgtagaataccgttactggcgtacgatcctacatatgtatcgtatggtccttccttctcagctagttcacaactcgcctctaatgcaccgtaataaatggtttcgaagatcttcttatttagatcttgtgcttccaggctatcaaatggataatttaagagaataaacgcgtccgctaatccttgaacaccaataccgataggtctatgtctcttattagagatttcagcttctggaataggataataattaatatctataattttattgagatttctgacaattactttgaccacatccttcagtttgagaaaatcaaatcgcccatctattacaaacatgttcaaggcaacagatgccagattacaaacggctacctcattagcatccgcatattgtattatctcagtgcaaagattactacacttgatagttcctaaattttgttgattactctttttgttacacgcatccttataaagaatgaatggagtaccagtttcaatctgagattctataatcgctttccagacgactcgagcctttattatagatttgtatctcctttctctttcgtatagtgtatacaatcgttcgaactcgtctccccaaacattgtccaatccaggacattcatccggacacatcaacgaccactctccgtcatccttcactcgtttcataaagagatcaggaatccaaagagctataaatagatctctggttctatgttcctcgtttcctgtattctttttaagatcgaggaacgccataatatcagaatgccacggttccaagtatatggccataactccaggccgtttgtttcctccctgatctatgtatctagcggtgttattataaactctcaacattggaataataccgtttgatataccattggtaccggagatatagcttccactggcacgaatattactaattgatagacctattccccctgccattttagagattaatgcgcatcgttttaacgtgtcatagataccctctatgctatcatcgatcatgttaagtagaaaacagctagacatttggtgacgactagttcccgcattaaataaggtaggagaagcgtgcgtaaaccatttttcagaaagtagattgtacgtctcaatagctgagtctatatcccattgatgaattcctactgcgacacgcattaacatgtgctgaggtctttcaacgatcttgttgtttattttcaacaagtaggatttttccaaagttttaaaaccaaaatagttgtatgaaaagtctcgttcgtaaataataaccgagttgagtttatccttatatttgttaactatatccatggtgatacttgaaataatcggagaatgtttcccatttttaggattaacatagttgaataaatcctccatcacttcactaaatagtttttttgtttccttgtgtagatttgatacggctattctggcggctagaatggcataatccggatgttgtgtagtacaagtggctgctatttcggctgccagagtgtccaattctaccgttgttactccattatatattccttgaataaccttcatagctattttaataggatctatatgatccgtgtttaagccataacataattttctaatacgagacgtgattttatcaaacatgacattttccttgtatccatttcgtttaatgacaaacatttttgttggtgtaataaaaaaaattatttaacttttcattaatagggatttgacgtatgtagcgtacaaaattatcgttcctggtatatagataaagagtcctatatatttgaaaatcgttacggctcgattaaactttaatgattgcatagtgaatatatcattaggatttaactccttgactatcatggcggcgccagaaattaccatcaaaagcattaatacagttatgccgatcgcagttagaacggttatagcatccaccatttatatctaaaaattagatcaaagaatatgtgacaaagtcctagttgtatactgagaattgacgaaacaatgtttcttacatattttttttttattagtaaccgacttaatagtaggaactggaaaactagacttgattattctataagtatagatacccttccaaataatattctctttgataaaagttccagaaaatgtagaattttttaaaaagttatcttttgctattaccaagattgtgtttagacgcttattattaatatgagtgatgaaatccacaccgcctctagatatcgcttttatttccacattagatggtaaatccaatagtgaaactatctttttaggaatgtatggactcgcgtttagaggagtgaacgtcttaggcgtcggaaaggatgattcatcaaacgaataaacaatttcacaaatggatgttaatgtattagtaggaaattttttgacgctagtggaattgaagattctaatggatgatgttctacctatttcatccgataacatgttaatttccgacaccaacggttttaatatttcgatgatatacggtagtctctctttcggacttatatagcttattccacaatacgagtcattatatactccaaaaaacaaaataactagtataaaatctgtatcgaatgggaaaaacgaaattatcgacataggtatagaatctggaacattgaacgtattaatacttaattctttttctgtggtaagtaccgataggttattgacattgtatggttttaaatattctataacttgagacttgatagatattagtgatgaattgaaaattatttttatcaccacgtgtgtttcaggatcatcgtcgacgcccgtcaaccaaccgaatggagtaaaataaatatcattaatatatgctctagatattagtatttttatcaatcctttgattatcatcttctcgtaggcgaatgattccatgatcaagagtgatttaagaacatcctccggagtattaatgggcttagtaaacagtccatcgttgcaataataaaagttatccaagttaaaggatattatgcattcgtttaaagatatcacctcatctgacggagacaattttttggtaggttttagagactttgaagctacttgtttaacaaagttattcatcgtcgtttactattctatttaattttgtagttaatttatcacatatcacattaattgactttttggtccatttttccatacgtttatattcttttaatcctgcgttatccgtttccgttatatccagggatagatcttgcaagttaaatagaatgctcttaaataatgtcattttcttatccgctaaaaatttaaagaatgtataaacctttttcagagatttgaaactcttaggtggtgtcctagtacacaatatcataaacaaactaataaacattccacattcagattccaacagctgattaacttctacattaatacagcctattttcgctccaaatgtacattcgaaaaatctgaataaaacatcgatgtcacaatttgtattatccaatacagaatgtttgtgattcgtgttaaaaccatcggagaaggaataaaaataaaaattattatagtggtggaattcagttggaatattgcctccggagtcataaaaggatactaaacattgttttttatcataaattacacatttccaatgagacaaataacaaaatccaaacattacaaatctagaggtagaacttttaattttgtctttaagtatatacgataagatatgtttattcataaacgcgtcaaatttttcatgaatcgctaaggagtttaagaatctcatgtcaaattgtcctatataatccacttcggatccataagcaaactgagagactaagttcttaatacttcgattgctcatccaggctcctctctcaggctctattttcatcttgacgacctttggattttcaccagtatgtattcctttacgtgataaatcatcgattttcaaatccatttgtgagaagtctatcgccttagatactttttcccgtagtcgaggtttaaagaaatacgctaacggtatactagtaggtaactcaaagacatcatatatagaatggtaacgcgtctttaactcgtcggttaactctttcttttgatcgagttcgtcgctactattgggtctgctcaggtgccccgactctactagttccaacatcataccgataggaatacaagacactttgccggcggttgtagatttatcatatttctccactacatatccgttacaatttgttaaaaatttagatacatctatattgctacataatccagctagtgaatatatatgacataataaattggtaaatcctagttctggtattttactaattactaaatctgtatatctttccatttatcatggaaaagaatttaccagatatcttcttttttccaaactgcgttaatgtattctcttacaaatattcacaagatgaattcagtaatatgagtaaaacggaacgtgatagtttctcattggcggtgtttccagttataaaacatagatggcataacgcacacgttgtaaaacataaaggaatatacaaagttagtacagaagcacgtggaaaaaaagtatctcctccatcactaggaaaacccgcacacataaacctaaccgcgaagcaatatatatacagtgaacacacaataagctttgaatgttatagttttctaaaatgtataacaaatacagaaatcaattcgttcgatgagtatatattaagaggactattagaagctggtaatagtttacagatattttccaattccgtaggtaaacgaacagatactataggtgtactagggaataagtatccatttagcaaaattccattggcctcattaactcctaaagcacaacgagagatattttcagcgtggatttctcatagacctgtagttttaactggaggaactggagtgggtaagacgtcacaggtacccaagttattgctttggtttaattatttatttggtggattctctactctagataaaatcactgactttcacgaaagaccagtcattctatctcttcctaggatagctttagttagattgcatagcaataccattttaaaatcattgggatttaaggtactagatggatctcctatttctttacggtacggatctataccggaagaattaataaacaaacaaccaaaaaaatatggaattgtattttctacccataagttatctctaacaaaactatttagttatggcactcttattatagacgaagttcatgagcatgatcaaataggagatattattatagcagtagcgagaaagcatcatacgaaaatagattctatgtttttaatgactgccacgttagaggatgacagggaacggctaaaagtatttttacctaatcccgcatttatacatattcctggagatacactgtttaaaattagcgaggtatttattcataataagataaatccatcttccagaatggcatacatagaagaagaaaagagaaatttagttactgctatacagatgtatactcctcctgatggatcatccggtatagtctttgtggcatccgttgcacagtgtcacgaatataaatcatatttagaaaaaagattaccgtatgatatgtatattattcatggtaaggtcttagatatagacgaaatattagaaaaagtgtattcatcacctaatgtatcgataattatttctactccttatttggaatccagcgttactatacgcaatgttacacacatttatgatatgggtagagtttttgtccccgctccttttggaggatcgcaagaatttatttctaaatctatgagagatcaacgaaaaggaagagtaggaagagttaatcctgggacatacgtatatttctatgatctgtcttatatgaagtctatacagcgaatagattcagaatttctacataattatatattgtacgctaataagtttaatctaacactccccgaagatttgtttataatccctacaaatttggatattctatggcgtacaaaggaatatatagactcgttcgatattagtacagaaacatggaataaattattatccaattattatatgaagatgatagagtatgctaaactttatgtactaagtcctattctcgctgaggagttggataattttgagaggacgggagaattaactagtattgtacaagaagccattttatctctaaatttacgaattaagattttaaattttaaacataaagatgatgatacgtatatacacttttgtaaaatattattcggtgtctataacggaacaaacgctactatatattatcatagacctctaacgggatatatgaatatgatttcagatactatatttgttcctgtagataataactaaaaatcaaactctaatgaccacatctttttttagagatgaaaaattttccacatctccttttgtagacacgactaaacattttgcagaaaaaagtttattagtgtttagataatcgtatacttcatcagtgtagatagtaaatgtgaacagataaaaggtattcttgctcaatagattggtaaattccatagaatatattaatcctttcttcttgagatcccacatcatttcaaccagagacgttttatccaatgatttacctcgtactataccacatacaaaactagattttgcagtgacgtcgtatctggtattcctaccaaacaaaattttacttttagttcttttagaaaattctaaggtagaatctctatttgccaatatgtcatctatggaattaccactagcaaaaaatgatagaaatatatattgatacatcgcagctggttttgatctactatactttaaaaacgaatcagattccataattgcctgtatatcatcagctgaaaaactatgttttacacgtattccttcggcatttctttttaatgatatatcttgtttagacaatgataaagttatcatgtccatgagagacgcgtctccgtatcgtataaatatttcattagatgttagacgcttcattaggggtatacttctataaggtttcttaatcagtccatcattggttgcgtcaagaactactatcggatgttgttgggtatctctagtgttacacatggccttactaaagtttgggtaaataactatgatatctctattaattatagatgcatatatttcatttgtcaaggatattagtatcgacttgctatcgtcattaatacgtgtaatgtaatcatataaatcatgcgatagccaaggaaaatttaaatagatgttcatcatataatcgtcgctataattcatattaatacgttgacattgactaatttgtaatatagcctcgccacgaagaaagctctcgtattcagtttcatcgataaaggataccgttaaatataactggttgccgatagtctcatagtctattaagtggtaagtttcgtacaaatacagaatccctaaaatattatctaatgttggattaatctttaccataactgtataaaatggagacggagtcataactattttaccgtttgtacttactggaatagacgaaggaataatctccggacatgctggtaaagacccaaatgtctgtttgaagaaatccaatgttccaggtcctaatctcttaacaaaaattacgatattcgatcccgatatcctttgcattctatttaccagcatatcacgaactatattaagattatctatcatgtctattctcccaccgttatataaatcgcctccgctaagaaacgttagtatatccatacaatggaatacttcatttctaaaatagtattcgttttctaattctttaatgtgaaatcgtatactagaaagggaaaaattatctttgagttttccgttagaaaagaaccacgaaactaatgttctgattgcgtccgattccgttgctgaattaatggatttacaccaaaaactcatataacttctagatgtagaagcattcgctaaaaaattagtagaatcaaaggatataagtagatgttccaacaagtgagcaattcccaagatttcatctatatcattctcgaatccgaaattagaaattcccaagtagatatcctttttcatccgatcgttgatgaaaatacgaactttattcggtaagacaatcatttactaaggagtaaaataggaagtaatgttcgtatgtcgttatcatcgtataaattaaaggtgtgttttttaccattaagtgacattataattttaccaatattggaattataatataggtgtatttgcgcactcgcgacggttgatgcatcggtaaatatagctgtatctaatgttctagtcggtatttcatcatttcgctgtctaataatagcgttttctctatctgtttccattacagctgcctgaagtttattggtcggataatatgtaaaataataagaaatacatacgaataacaaaaataaaataagatataataaagatgccatttagagatctaattttgtttaacttgtccaaattcctacttacagaagatgaggaatcgttggagatagtgtcttccttatgtagaggatttgaaatatcttatgatgacttgataacttactttccagataggaaataccataaatatatttctaaagtatttgaacatgtagatttatcggaggaattaagtatggaattccatgatacaactctgagagatttagtctatcttagattgtacaagtattccaagtgtatacggccgtgttataaattaggagataatctaaaaggcatagttgttataaaggacaggaatatttatattagagaagcaaatgatgacttgatagaatatctcctcaaggaatacactcctcagatttatacatattctaatgagcgcgtccccataactggttcaaaattaattctttgtggattttctcaagttacatttatggcgtatacaacgtcgcatataacaacaaataaaaaggtagatgttctcgtttccaaaaaatgtatagatgaactagtcgatccaataaattatcaaatacttcaaaatttatttgataaaggaagcggaacaataaacaaaatactcaggaagatattttattcggtaaccggtggccaaactccataatttgctttttctatttcggattttagaatttccaaattcaccagcgatttatcggttttggtgaaatccaaggatttattaatgtccacaaatgccatttgttttgtctgtggattgtatttgaaaatggaaacgatgtagttagatagatgcgctgcaaagtttcctattagggttccgcgctttacgtcacccagcatacttgaatcaccatcctttaaaaaaaatgataagatatcaacatggagtatatcatactcggattttaattcttctactgcatcactgacattttcacaaatactacaatacggtttaccgaaaataatcagtacgttcttcatttatgggtatcaaaaacttaaaatcgttactgctggaaaataaatcactgacgatattagatgataatttatacaaagtatacaatggaatatttgtggatacaatgagtatttatatagccgtcgccaattgtgtcagaaacttagaagagttaactacggtattcataaaatacgtaaacggatgggtaaaaaagggagggcatgtaaccctttttatcgatagaggaagtataaaaattaaacaagacgttagagacaagagacgtaaatattctaaattaaccaaggacagaaaaatgctagaattagaaaagtgtacatccgaaatacaaaatgttaccggatttatggaagaagaaataaaggcagaaatgcaattaaaaatcgataaactcacatttcaaatatatttatctgattctgataacataaaaatatcattgaatgagatactaacacatttcaacaataatgagaatgttacattattttattgtgatgaacgagacgcagaattcgttatgtgtctcgaggctaaaacacatttctctaccacaggagaatggccgttgataataagtaccgatcaggatactatgctatttgcatctactgataatcatcctaagatgataaaaaacttaactcaactgtttaaatttgttccctcggcagaggataactatttagcaaaattaacggcgttagtgaatggatgtgatttctttcctggactctatggggcatctataacacccaccaacttaaacaaaatacaattgtttagtgattttacaatcgataatatagtcactagtttggcaattaaaaattattatagaaagactaactctaccgtagacgtgcgtaatattgttacgtttataaacgattacgctaatttagacgatgtctactcgtatgttcctccttgtcaatgcactgttcaagaatttatattttccgcattagatgaaaaatggaacaattttaaatcatcttatttagagaccgttccgttaccctgccaattaatgtatgcattagaaccacgcaaggagattgatgtttcagaagttaaaactttatcatcttatatagatttcgaaaatactaaatcagatatcgatgttataaaatctatatcttcgatcttcggatattctaacgaaaactgtaacactatagtgttcggcatctataaggataatttactactgagtataaatagttcattttactttaacgatagtctgttaataaccaatactaaaagtgataatataataaatataggttactagattaaaaatggtgttccaactcgtgtgctctacgtgcggcaaagatatttctcacgaacgatataaattgattatacgaaaaaaatcattaaaggatgtactcgtcagtgtaaagaacgaatgttgtaggttaaaattatctacacaaatagaacctcaacgtaacttaacagtgcaacctctattggatataaactaatatggatccggttaattttatcaagacatatgcgcctagaggttctattatttttattaattataccatgtcattaacaagtcatttgaatccatcgatagaaaaacatgtgggtatttattatggtacgttattatcggaacacttggtagttgaatctacctatagaaaaggagttcgaatagtcccattggatagtttttttgaaggatatcttagtgcaaaagtatacatgttagagaatattcaagttatgaaaatagcagctgatacgtcattaactttattgggtattccgtatggatttggtcataatagaatgtattgttttaaattggtagctgaatgttataaaaatgccggtattgatacatcgtctaaacgaatattaggtaaagatatttttctgagccaaaacttcacagatgataatagatggataaagatatatgattctaataatttaacattttggcaaattgattaccttaaagggtgagttaatatgcataactactcctccgttgttttttccctcgttctttttcttaacgttgtttgccatcactctcataatgtaaagatattctaaaatggtaaacttttgcatatcggacgcagaaattggtataaatgttgtaattgtattatttcccgtcaatggactagtcacagctccatcagttttatatcctttagagtatttctcactcgtgtctaacattctagagcattccatgatctgtttatcgttgatattggccggaaagatagattttttattttttattatattactattggcaattgtagatataacttctggtaaatatttttctaccttttcaatctcttctattttcaagccggctatatattctgctatattgttgctagtatcaataccttttctggctaagaagtcatatgtggtattcactatatcagttttaactggtagttccattagcctttccacttctgcagaataatcagaaattggttctttaccagaaaatccagctactataataggctcaccgatgatcattggcaaaatcctatattgtaccagattaatgagagcatatttcatttccaataattctgctagttcttgagacattgatttatttgatgaatctagttggttctctagatactctaccatttctgccgcatacaataacttgttagataaaatcagggttatcaaagtgtttagcgtggctagaatagtgggcttgcatgtattaaagaatgcggtagtatgagtaaaccgttttaacgaattatatagtctccagaaatctgtggcgttacatacatgagccgaatgacatcgaagattgtccaatatttttaatagctgctctttgtccattatttctatatttgactcgcaacaattgtagataccattaatcactgattcctttttcgatgccggacaatagcacaattgtttagctttggactctatgtattcagaattaatagatatatctctcaatacagattgcactatacattttgaaactatgtcaaaaattgtagaacgacgctgttctgcagccatttaactttaaataatttacaaaaatttaaaatgagcatccgtataaaaatcgataaactgcgccaaattgtggcatatttttcagagttcagtgaagaagtatctataaatgtagactcgacggatgagttaatgtatatttttgccgccttgggcggatctgtaaacatttgggccattatacctctcagtgcatcagtgttctaccgcggagccgaaaacattgtgtttaatcttcctgtgtccaaggtaaaatcgtgtttgtgtagttttcacaatgatgccatcatagatatagaacctgatctggaaaataatctagtaaaactttctagttatcatgtagtaagtgtcgattgtaacaaggaactgatgcctattaggacagatactactatttgtctaagtatagatcaaaagaaatcttacgtgtttaattttcacaagtatgaagaaaaatgttgtggtagaaccgtcattcatttagaatggttgttgggctttatcaagtgtattagtcagcatcagcatttggctattatgtttaaagatgacaatattattatgaagactcctggtaatactgatgcgttttccagggaatattctatgactgaatgttctcaagaactacaaaagttttctttcaaaatagctatctcgtctctcaacaaactacgaggattcaaaaagagagtcaatgtttttgaaactagaatcgtaatggataatgacgataacattctaggaatgttgttttcggatagagttcaatcctttaagatcaacatctttatgacgtttttagattaatactttcaatgagataaatatgggtggcagagtaagtgttgagctccctaaacgggatccgcctccgggagtacccactgatgagatgttattaaacgtggataaaatgcatgacgtgatagctcccgctaagcttttagaatatgtgcatataggaccactagcaaaagataaagaggataaagtaaagaaaagatatccagagtttagattagtcaacacaggacccggtggtctttcggcattgttaagacaatcgtataatggaaccgcacccaattgctgtcgcacttttaatcgtactcattattggaaaaaggatggaaagatatcagataagtatgaagagggtgcagtattagaatcgtgttggccagacgttcacgacactggaaaatgcgatgttgatttattcgactggtgtcagggggatacgttcgatagaaacatatgccatcagtggatcggttcagcctttaataggagtgatagaactgtagagggtcaacaatcgttaataaatctgtataataagatgcaaacattatgtagtaaagatgctagtgtaccaatatgtgaatcatttttgcatcatttacgcgcacacaatacagaagatagcaaagagatgatcgattatattctaagacaacagtctgcggactttaaacagaaatatatgagatgtagttatcccactagagataagttagaagagtcattaaaatatgcggaacctcgagaatgttgggatccagagtgttcgaatgccaatgttaatttcttactaacacgtaattataataatttaggactttgcaatattgtacgatgtaatactagcgtgaacaacttacagatggataaaacttcctcattaagattgtcatgtggattaagcaatagtgatagattttctactgttcccgtcaatagagcaaaagtagttcaacataatattaaacattcgttcgacctaaaattgcatttgatcagtttattatctctcttggtaatatggatactaattgtagctatttaaatgggtgccgcggcaagcatacagacgacggtgaatacactcagcgaacgtatctcgtctaaattagaacaagaagcgaacgctagtgctcaaacaaaatgtgatatagaaatcggaaatttttatatccgacaaaaccatggatgtaacctcactgttaaaaatatgtgctctgcggacgcggatgctcagttggatgctgtgttatcagccgctacagaaacatatagtggattaacaccggaacaaaaagcatacgtaccagctatgtttactgctgcgttaaacattcagacgagtgtaaacactgttgttagagattttgaaaattatgtgaaacagacttgtaattctagcgcggtcgtcgataacaaattaaagatacaaaacgtaatcatagatgaatgttacggagccccaggatctccaacaaatttggaatttattaatacaggatctagcaaaggaaattgtgccattaaagcgttgatgcaattgacgactaaggccactactcaaatagcacctagacaagttgctggtacaggagttcagttttatatgattgttatcggtgttataatattggcagcgttgtttatgtactatgccaagcgtatgttgttcacatccaccaatgataaaatcaaacttattttagccaataaggaaaacgtccattggactacttacatggacacattctttagaacttctccgatggttattgctaccacggatatgcaaaactgaaaatatattgataatattttaatagattaacatggaagttatcgctgatcgtctagacgatatagtgaaacaaaatatagcggatgaaaaatttgtagattttgttatacacggtctagagcatcaatgtcctgctatacttcgaccattaattaggttgtttattgatatactattatttgttatagtaatttatatttttacggtacgtctagtaagtagaaattatcaaatgttgttggcgttggtggcgctagtcatcacattaactattttttattactttatactataatagtactagactgacttctaacaaacatctcacctgccataaataaatgcttgatattaaagtcttctatttctaacactattccatctgtggaaaataatactctgacattatcgctaattgacacatcggtgagtgatatgcctataaagtaataatcttctttgggcacatataccagtgtaccaggttctaacaacctatttactggtgctcctgtagcatactttttctttaccttgagaatatccatcgtttgcttggtcaatagcgatatgtgattttttatcaaccactcaaaaaagtaattggagtgttcatatcctctacgggctattgtctcatggccgtgtatgaaatttaagtaacacgactgtggtagatttgttctatagagccggttgccgcaaatagatagaactaccaatatgtctgtacaaatgttaaacattaattgattaacagaaaaaacaatgttcgttctgggaatagaaaccagatcaaaacaaaattcgttagaatatatgccacgtttatacatggaatataaaataactacagtttgaaaaataacagtatcatttaaacatttaacttgcggggttaatttcacaactttactgtttttaaactgttcaaaatatagcatcgatccatgagaaatacgtttagccgcctttaatagaggaaatcccaccgcctttctggatctcaccaacgacgatagttctgaccagcaacttatttcttcatcatccacctgttttaacatataataggcaggagatagatatccgtcattgcaatattccttttcgtaggcacacaatctaatattgataaaatctccattctcttctctgcatttattatcttgtttcggtggctgattaggctgtagtcttggtttaggctttggtatatcgttgttgaatctattttggtcattaaatctttcatttcttcctggtatatttctatcacctcgtttggttggatttttgtctatattatcgtttgtaacatcggtacgggtattcatttatcacaaaaaaaacttctctaaatgagtctactgctagaaaacctcatcgaagaagataccatattttttgcaggaagtatatctgagtatgatgatttacaaatggttattgccggcgcaaaatccaaatttccaagatctatgctttctatttttaatatagtacctagaacgatgtcaaaatatgagttggagttgattcataacgagaatatcacaggggcaatgtttaccacaatgtataatataagaaacaatttgggtctaggagatgataaactaactattgaagccattgaaaactatttcttggatcctaacaatgaggttatgcctcttatcattaataatacggatatgactgccgtcattcctaaaaaaagtggtaggagaaagaataagaacatggttattttccgtcaaggatcatcacctatcttgtgtattttcgaaactcgtaaaaagattaatatttataaagaaaatatggaatccgcgtcgactgagtatacacctatcggagacaacaaggctttgatatctaaatatgcgggaattaatgtcctgaatgtgtattctccttccacatccatgagattgaatgccatttacggattcaccaataaaaataaactagagaaacttagtactaataaggaactagaatcgtatagttctagccctcttcaagaacccattaggttaaatgattttctgggactattggaatgtgttaaaaagaatattcctctaacagatattccgacaaaggattgattactataaatggagaatgttcctaatgtatactttaatcctgtgtttatagagcccacgtttaaacattctttattaagtgtttataaacacagattaatagttttatttgaagtattcattgtattcattctaatatatgtattttttagatctgaattaaatatgttcttcatgcctaaacgaaaaatacccgatcctattgatagattacgacgtgctaatctagcgtgtgaagacgataaattaatgatctatggattaccatggatgacaactcaaacatctgcgttatcaataaatagtaaaccgatagtgtataaagattgtgcaaagcttttgcgatcaataaatggatcacaaccagtatctcttaacgatgttcttcgcagatgatgattcattttttaagtatttggctagtcaagatgatgaatcttcattatctgatatattgcaaatcactcaatatctagactttctgttattattattgatccaatcaaaaaataaattagaagccgtgggtcattgttatgaatctctttcagaggaatacagacaattgacaaaattcacagactttcaagattttaaaaaactgtttaacaaggtccctattgttacagatggaagggtcaaacttaataaaggatatttgttcgactttgtgattagtttgatgcgattcaaaaaagaatcctctctagctaccaccgcaatagatcctattagatacatagatcctcgtcgcgatatcgcattttctaacgtgatggatatattaaagtcgaataaagtgaacaataattaattctttattgtcatcatgaacggcggacatattcagttgataatcggccccatgttttcaggtaaaagtacagaattaattagacgagttagacgttatcaaatagctcaatataaatgcgtgactataaaatattctaacgataatagatacggaacgggactatggacgcatgataagaataattttgaagcattggaagcaactaaactatgtgatgtcttggaatcaattacagatttctccgtgataggtatcgatgaaggacagttctttccagacattgttgaattctgtgagcgtatggcaaacgaaggaaaaatagttatagtagccgcactcgatgggacatttcaacgtaaaccgtttaataatattttgaatcttattccattatctgaaatggtggtaaaactaactgctgtgtgtatgaaatgctttaaggaggcttccttttctaaacgattgggtgaggaaaccgagatagagataataggaggtaatgatatgtatcaatcggtgtgtagaaagtgttacgtcggctcataatattatattttttatctaaaaaactaaaaataaacattgattaaattttaatataatacttaaaaatggatgttgtgtcgttagataaaccgtttatgtattttgaggaaattgataatgagttagattacgaaccagaaagtgcaaatgaggtcgcaaaaaaactgccgtatcaaggacagttaaaactattactaggagaattattttttcttagtaagttacagcgacacggtatattagatggtgccaccgtagtgtatataggatctgctcccggtacacatatacgttatttgagagatcatttctataatttaggagtgatcatcaaatggatgctaattgacggccgccatcatgatcctattttaaatggattgcgtgatgtgactctagtgactcggttcgttgatgaggaatatctacgatccatcaaaaaacaactgcatccttctaagattattttaatttctgatgtgagatccaaacgaggaggaaatgaacctagtacggcggatttactaagtaattacgctctacaaaatgtcatgattagtattttaaaccccgtggcgtctagtcttaaatggagatgcccgtttccagatcaatggatcaaggacttttatatcccacacggtaataaaatgttacaaccttttgctccttcatattcagctgaaatgagattattaagtatttataccggtgagaacatgagactgactcgagttaccaaatcagacgctgtaaattatgaaaaaaagatgtactaccttaataagatcgtccgtaacaaagtagttgttaactttgattatcctaatcaggaatatgactattttcacatgtactttatgctgaggaccgtgtactgcaataaaacatttcctactactaaagcaaaggtactatttctacaacaatctatatttcgtttcttaaatattccaacaacatcaactgaaaaagttagtcatgaaccaatacaacgtaaaatatctagcaaaaattctatgtctaaaaacagaaatagcaagagatccgtacgcagtaataaatagaaacgtactactgagatatactaccgatatagagtataatgatttagttactttaataaccgttagacataaaattgattctatgaaaactgtgtttcaggtatttaacgaatcatccataaattatactccggttgatgatgattatggagaaccaatcattataacatcgtatcttcaaaaaggtcataacaagtttcctgtaaattttctatacatagatgtggtaatatctgacttatttcctagctttgttagactagatactacagaaactaatatagttaatagtgtactacaaacaggcgatggtaaaaagactcttcgtcttcccaaaatgttagagacggaaatagttgtcaagattctctaccgtcctaatataccattaaaaattgttagatttttccgcaataacatggtaactggagtagagatagccgatagatctgttatttcagtcgctgattaatcaattagtagagatgagataagaacattataataatcaataatatattttatatcttatatcttgtttagaaaaatgctaatattaaaatagctaacgctagtaatccaatcggaagccatttgatatctataatagggtatctaatttcctgattcagatagcggacagctatattctcggtagctactcgtttggaatcacaaacattatttacatctaatttactatctgtaatggaaacgtttcccaatgaaatggtacaatccgatacattgcattttgttatatttttttttaaagaggctggtaacaacgcatcgcttcgtttacatggctcgtaccaacaataatagggtaatcttgtatctattcctatccgtactatgcttttatcaggataaatacatttacatcgtatatcgtctttgttagcatcacagaatgcataaatttgttcgtccgtcatgataaaaatttaaagtgtaaatataactattattttatagttgtaataaaaagggaaatttgattgtatactttcggttctttaaaagaaactgacttgataaaaatggctgtaatctctaaggttacgtatagtctatatgatcaaaaagagattaatgctacagatattatcattagtcatgttaaaaatgacgacgatatcggtaccgttaaagatggtagactaggtgctatggatggggcattatgtaaaacttgtgggaaaacggaattggaatgtttcggtcactggggtaaagtaagtatttataaaactcatatagttaagcctgaatttatttcagaaattattcgtttactgaattatatatgtattcactgcggattattgcgttcacgagaaccgtattccgacgatattaacctaaaagagttatcgggacacgctcttaggagattaaaggataaaatattatccaagaaaaagtcatgttggaacagtgaatgtatgcaaccgtatcaaaaaattactttttcaaagaaaaaggtttgtttcgtcaacaagttggatgatattaacgttcctaattctctcatctatcaaaagttaatttctattcatgaaaagttttggccattattagaaattcatcaatatccagctaacttattttatacagactactttcccatccctccgttgattattagaccggctattagtttttggatagatagtatacccaaagaaaccaatgaattaacttacttattaggtatgatcgttaagaattgtaacttgaatgctgatgaacaggttatccagaaggcggtaatagaatacgatgatattaaaattatttctaataacacttccagtatcaatttatcatatatcacatccggcaaaaataatatgattagaagttatatcgtcgcccggcgaaaagatcagaccgctagatctgtaattggtcccagtacatctatcaccgttaatgaggtaggaatgcccgcatatattagaaatacacttacagaaaagatatttgttaatgcctttacagtggataaagttaaacaactattagcgtcaaaccaagttaaattttactttaataaacgattaaaccaattaacaagaatacgccaaggaaagtttatcaaaaataaaatacatttattgcctggtgattgggtagaagtagctgttcaagaatatacaagtattatttttggaagacagccgtctctacatagatacaacgtcatcgcttcatctatcagagctaccgaaggagatactatcaaaatatctcccggaattgtcaactctcaaaatgctgatttcgacggagatgaagaatggatgatattggagcaaaatcctaaagccgtaattgaacaaagtattcttatgtatccgacgacgttactcaaacacgatattcatggagcccccgtttatggatctattcaagatgaaatcgtagcagcgtattcattgtttaggatacaagatctttgtttagatgaagtattgaacatcttggggaaatatggaagagagttcgatcctaaaggtaaatgtaaattcagcggtaaagatatctatacttacttgataggtgaaaagattaattatccgggtctcttaaaggatggtgaaattattgcaaacgacgtagatagtaattttgttgtggctatgaggcatctgtcattggctggactcttatccgatcataagtcgaacgtggaaggtatcaactttattatcaagtcatcttatgtttttaagagatatctatctatttacggttttggggtgacattcaaagatctgagaccaaattcgacgttcactaataaattggaggccatcaacgtagaaaaaatagaacttatcaaagaagcatacgccaaatatctcaacgatgtaagagacgggaaaatagttccattatctaaagctttagaggcggactatgtggaatccatgttatccaacttgacaaatcttaatatccgagagatagaagaacatatgagacaaacgctgatagatgatccagataataacctcctgaaaatggccaaagcgggttataaagtaaatcccacagaactaatgtatattctaggtacttatggacaacagaggattgatggtgaaccagcagagactcgagtattgggtagagtcttaccttactatcttccagactctaaggatccagaaggaagaggttacattcttaattctttaacaaaaggattaacgggttctcaatattacttttcgatgctggttgcaagatctcaatctactgatatcgtctgtgaaacatcacgtaccggaacactggctagaaaaatcattaaaaagatggaggatatggtggtcgacggatacggacaagtagttataggtaatacgctcatcaagtacgccgccaattataccaaaattctaggctcagtatgtaaacctgtagatcttatctatccagatgagtccatgacttggtatttggaaattagtgctctgtggaataaaataaaacagggattcgtttactctcagaaacagaaacttgcaaaaaagacattggcgccgtttaatttcctagtattcgtcaaacccaccactgaggataatgctattaaggttaaggatctgtacgatatgattcataacgtcattgatgatgtgagagagaaatacttctttacggtatctaatatagattttatggagtatatattcttgacgcatcttaatccttctagaattagaattacaaaagaaacggctatcactatctttgaaaagttctatgaaaaactcaattatactctaggtggtggaactcctattggaattatttctgcacaggtattgtctgagaagtttacacaacaagccctgtccagttttcacactactgaaaaaagtggtgccgtcaaacaaaaacttggtttcaacgagtttaataacttgactaatttgagtaagaataagaccgaaattatcactctggtatccgatgatatctctaaacttcaatctgttaagattaatttcgaatttgtatgtttgggagaattaaatccaaacatcactcttcgaaaagaaacagataggtatgtagtagatataatagtcaatagattatacatcaagagagcagaaattaccgaattagtcgtcgaatatatgattgaacgattcatctcctttagcgtcattgtaaaggaatggggtatggaaacattcattgaggatgaggataatattagatttactgtctacctaaatttcgttgaaccggaagaattgaatcttagtaagtttatgatggttcttccgggtgccgccaacaagggcaagattagtaaattcaagattcctatctctgattatacgggatatgacgacttcaatcaaacaaaaaagctcaataagatgactgtagaactcatgaatctaaaagaattgggttctttcgatttggaaaacgtcaacgtgtatcctggagtatggaatacatacgatatcttcggtatcgaggccgctcgtgaatacttgtgcgaagccatgttaaacacctatggagaagggttcgattatctgtatcagccttgtgatcttctcgctagtttactatgtgctagttacgaaccagaatcagtgaataaattcaagttcggcgcagctagtactcttaagagagctacgttcggagacaataaagcattgttaaacgcggctcttcataaaaagtcagaacctattaacgataatagtagctgccacttttttagcaaggtccctaatataggaactggatattacaaatactttatcgacttgggtcttctcatgagaatggaaaggaaactatctgataagatatcttctcaaaagatcaaggaaatggaagaaacagaagacttttaattcttatcaataacatatttttctatgatctgtcttttaaacgatggattttccacaaatgcgcctctcaagtccctcatagaatgatacacgtataaaaaatatagcataggcaatgactccttatttttagacattagatatgccaaaatcatagccccgcttctatttactcccgcagcacaatgaaccaacacgggctcgtttcgttgatcacatttagataaaaaggcggttacgtcgtcaaaatatttactaatatcggtagttgtatcatctaccaacggtatatgaataatattaatattagagttaggtaatgtatatttatccatcgtcaaatttaaaacatatttgaacttaacttcagatgatggtgcatccatagcatttttataatttcccaaatacacattattggttactcttgtcattatagtgggagatttggctttgtgcatatctccagttgaacgtagtagtaagtatttatacaaacttttcttatccatttataacgtacaaatggataaaactactttatcggtaaacgcgtgtaatttagaatacgttagagaaaaggctatagtaggcgtacaagcagccaaaacatcaacacttatattctttgttattatattggcaattagtgcgctattactctggtttcagacgtctgataatccagtctttaatgaattaacgagatatatgcgaattaaaaatacggttaacgattggaaatcattaacggatagcaaaacaaaattagaaagtgatagaggtagacttctagccgctggtaaggatgatatattcgaattcaaatgtgtggatttcggcgcctattttatagctatgcgattggataagaaaacatatctgccgcaagctattaggcgaggtactggagacgcgtggatggttaaaaaggcggcaaaggtcgatccatctgctcaacaattttgtcagtatttgataaaacacaagtctaataatgttattacttgtggtaatgagatgttaaatgaattaggttatagcggttattttatgtcaccgcattggtgttccgattttagtaatatggaatagtgttagataaatgcggtaacgaatgttcctgtaaggaaccataacagcttagatttaacgttaaagatgagcataaacataataaacaaaattacaatcaaacctataacattaatatcaaacaatccaaaaaatgaaatcagtggagtagtaaacgcgtacataactcctggataacgtttagcagctgccgttcctattctagaccaaaaattcggtttcatgttttcgaaacggtattctgcaacaagtcgaggatcgtgttctacatatttggcggcgttatccagtatctgcctattgatcttcatttcgttttcgattctggctatttcaaaataaaatcccgatgatagacctccagactttataatttcatctacgatgttcagcgccgtagtaactctaataatataggctgataagctaacatcataccctcctgtatatgtgaatatggcatgatttttgtccattacaagctcggttttaactttattgcctgtaataatttctctcatctgtaggatatctatttttttgtcatgcattgccttcaagacgggacgaagaaacgtaatatcctcaataacgttatcgttttctacaataactacatattctacctttttattttctaactcggtaaaaaaattagaatcccatagggctaaatgtctagcgatatttcttttcgtttcctctgtacacatagtgttacaaaaccctgaaaagaagtgagtatacttgtcatcatttctaatgtttcctccagtccactgtataaacgcataatccttgtaatgatctggatcatccttgactaccacaacatttcttttttctggcataacttcattgtcctttacatcatcgaacttctgatcattaatatgctcatgaacattaggaaatgtttctgatggaggtctatcaataactggcacaacaataacaggagttttcaccgccgccatttagttattgaaattaatcatatacaactctttaatacgagttatattttcgtctatccattgtttcacatttacatatttcgacaaaaagatataaaatgcgtattccaatgcttctctgtttaatgaattactaaaatatacaaacacgtcactgtctggcaataaatgatatcttagaatattgtaacaatttattttgtattgcacatgttcgtgatctatgagttcttcttcgaatggcataggatctccgaatctgaaaacgtataaataggagttagaataataatatttgagagtattggtaatatataaactctttagcggtataattagtttttttctctcgatttctatttttagatgtgatggaaaaatgactaattttgtagcattagtatcatgaactctaatcgagatcttaatatcttcgtcacacgttagttctttgaagtttttaagagatgcatcagttggttcgaccgatggagtaggtgcaacaattttttgttcgatgtatgtatgtactggagccattgtcttaactataatggtgcttgtatcgaaaaactttaatgcagataatggaagctcttcgccgcgactttctacatcgtaattgggttctaacgccgatctctgaatggatactagttttctaagttctaatgtgattctctgaaaatgtaaatccaattcctccggcattatagatgtgtatacatcggtaaataaaactatagtatccaacgatcccttctcgcaaattctagtcttaaccaaaaaatcgtatataaccacggagatggcgtatttaagagtggattcttctaccgttttgttcttggatttcatataagaaactataaagtccgcactactgttaagaatgattactaacgcaactatatagtttaaattaagcatcttggaaacataaaataactctgtagacgatacttgactttcgaataagtttgcagacaaacgaagaaagaacagacctctcttaatttcagaagaaaactttttttcgtattcctgacgtctagagtttatatcaataagaaagttaagaattagtcggttaatgttgtatttcattacccaagtttgagatttcataatattatcaaaagacatgataatattaaagataaagcgctgactatgaacgaaatagctatatggttcgctcaagaatatagtcttgttaaacgtggaaacgataactgtatttttaatcacgtcagcggcatctaaattaaatataggtatatttattccacacactctacaatatgccacaccatcttcataataaataaattcgttagcaaaattattaattttagtgaaatagttagcgtcaactttcatagcttccttcaatctaatttgatgctcacacggtgcgaattccactctaacatcccttttccatgcctcaggttcatcgatctctataatatctagttttttgcgtttcacaaacacaggctcgtctctcgcgatgagatctgtatagtaactatgtaaatgataactagatagaaagatgtagctatatagatgacgatcctttaagagaggtatgatgactttaccccaatcagatagactgttgttatggtcttcggaaaaagaatttttataaatttttccagtattttccaaatatacgtacttaacatctaaaaaatccttaatgataataggaatggataatccgtctattttataaagaaatacatatcgcacattatacttttttttggaaatgggaataccgatgtgtctacataaatatgcaaagtctaaatattttttagagaatcttagttggtccaaattcttttccaagtacggtaatagatttttcatattgaacggtatcttcttaatctctggttctagttccgcattaaatgatgaaactaagtcactatttttataactaacgattacatcacctctaacatcatcatttaccagaatactgatcttcttttgtcgtaaatacatgtctaatgtgttaaaaaaaagatcatacaagttatacgtcatttcatctgtggtattcttgtcattgaaggataaactcgtactaatctcttctttaacagcctgttcaaatttatatcctatatacgaaaaaatagcaaccagtgtttgatcatccgcgtcaatattctgttctatcgtagtgtataacaatcgtatatcttcttctgtgatagtcgatacgttataaaggttgataacgaaaatatttttatttcgtgagataaagtcatcgtaggattttggacttatattcgcgtctagtagatatgcttttatttttggaatgatctcaattagaatagtctctttagagtccatttaaagttacaaacaactaggaaattggtttatgatgtataatttttttagtttttatagattctttattctatacttaaaaaatgaaaataaatacaaaggttcttgagggttgtgttaaattgaaagcgagaaataatcataaattatttcattatcgcgatatccgttaagtttgtatcgtaatggcgtggtcaattacaaataaagcggatactagtagcttcacaaagatggctgaaatcagagctcatctaaaaaatagcgctgaaaataaagataaaaacgaggatattttcccggaagatgtaataattccatctactaagcccaaaaccaaacgagccactactcctcgtaaaccagcggctactaaaagatcaaccaaaaaggaggaagtggaagaagaagtagttatagaggaatatcatcaaacaactgaaaaaaattctccatctcctggagtcagcgacattgtagaaagcgtggctgctgtagagctcgatgatagcgacggggatgatgaacctatggtacaagttgaagctggtaaagtaaatcatagtgctagaagcgatctttctgacctaaaggtggctaccgacaatatcgttaaagatcttaagaaaattattactagaatctctgcagtatcgacggttctagaggatgttcaagcagctggtatctctagacaatttacttctatgactaaagctattacaacactatctgatctagtcaccgagggaaaatctaaagttgttcgtaaaaaagttaaaacttgtaagaagtaaatgcgtgcacttttttataaagatggtaaactctttaccgataataattttttaaatcctgtatcagacgataatccagcgtatgaggttttgcaacatgttaaaattcctactcatttaacagatgtagtagtatatgaacaaacgtgggaggaggcgttaactagattaatttttgtgggaagtgattcaaaaggacgtagacaatacttttacggaaaaatgcatgtacagaatcgcaacgctaaaagagatcgtatttttgttagagtatataacgttatgaaacgaattaattgttttataaacaaaaatataaagaaatcgtccacagattccaattatcagttggcggtttttatgttaatggaaactatgttttttattagatttggtaaaatgaaatatcttaaggagaatgaaacagtagggttattaacactaaaaaataaacacatagaaataagtcccgatgaaatagttatcaagtttgtaggaaaggacaaagtttcacatgaatttgttgttcataagtctaatagactatataaaccgctattgaaactgacggatgattctagtcccgaagaatttctgttcaacaaactaagtgaacgaaaggtatacgaatgtatcaaacagtttggtattagaatcaaggatctccgaacgtatggagtcaattatacgtttttatataatttttggacaaatgtaaagtccatatctcctcttccgtcaccaaaaaagttaatagcgttaactatcaaacaaactgctgaagtggtaggtcatactccatcaatttcaaaaagagcttatatggcaacgactattttagaaatggtaaaggataaaaattttttagatgtagtatctaaaactacgttcgatgaattcctatctatagtcgtagatcacgttaaatcatctacggatggatgatatagatctttacacaaataattacaagaccgataaatggaaatggataagcgtatgaaatctctcgcaatgacagctttcttcggagagctaaacacattagatattatggcattgataatgtctatatttaaacgccatccaaacaataccattttttcagtggataaggatggtcagtttatgattgatttcgaatacgataattataaggcttctcaatatttggatctgaccctcactccgatatctggagatgaatgcaagactcacgcatcgagtatagccgaacaattggcgtgtgtggatattattaaagaggatattagcgaatatatcaaaactactccccgtcttaaacgatttataaaaaaataccgcaatagatcagatactcgtatcagtcgagatacagaaaagcttaaaatagctctagctaaaggcatagattacgaatatataaaagacgcttgttaataagtaaatgaaaaaaaactagtcgtttataataaaacacaatatggatgccaacatagtatcatcttctactattgcaacgtatatagacgctttagcgaagaatgcttcagaattagaacagaggtctaccgcatacgaaataaataatgaattggaactagtatttattaagccgccattaattactttgacaaatgtagtgaatatctctacgattcaggaatcgtttattcgatttaccgttactaataaggaaggtgttaaaattagaactaagattccattatctaaggtacatggtctagatgtaaaaaatgtacagttagtagatgctatagataacatagtttgggaaaagaaatcattagtgacggaaaatcgtcttcacaaagaatgcttgttgagactatcgacagaggaacgtcatatatttttggattacaagaaatatggatcctctatccgactagaattagtcaatcttattcaagcaaaaacaaaaaactttacgatagactttaagctaaaatattttctaggatccggtgcccagtctaaaagttctttattacacgctattaatcatccaaagtcaaggcctaatacatctctggaaatagaattcacacctagagacaatgaaaaagttccatatgatgaactaataaaggaattgacgactctatcacgtcatatatttatggcttctccagagaatgtaattctttctccgcctattaacgcgcctataaaaacctttatgttgcctaaacaagatatagtaggtttggatctggaaaatctatatgccgtaactaagactgacggaattcctataactatcagagttacatcaaaagggttgtattgttattttacacatcttggttatattattagatatcctgttaagagaataatagattccgaagtagtagtctttggtgaggcagttaaggataagaactggaccgtatatctcattaagctaatagagcctgtgaatgcaatcaatgatagactagaagaaagtaagtatgttgaatctaaactagtggatatttgtgatcggatagtattcaagtcaaagaaatacgaaggtccgtttactacaactagtgaagtcgtcgatatgttatctacatatttaccaaagcaaccagaaggtgttattctgttctattcaaagggacctaaatctaacattgattttaaaattaaaaaggaaaatactatagaccaaactgcaaatgtagtatttaggtacatgtccagtgaaccaattatctttggagaatcgtctatctttgtagagtataagaaatttagcaacgataaaggctttcctaaagaatatggttctggtaagattgtgttatataacggcgttaattatctaaataatatctattgtttggaatatattaatacacataatgaagtgggtattaagtccgtggttgtacctattaagtttatagcagaattcttagttaatggagaaatacttaaacctagaattgataaaaccatgaaatatattaactcagaagattattatggaaatcaacataatatcatagtcgaacatttaagagatcaaagcatcaaaataggagatatctttaacgaggataaactatcggatgtgggacatcaatacgccaataatgataaatttagattaaatccagaagttagttattttacgaataaacgaactagaggaccgttgggaattttatcaaactacgtcaagactcttcttatttctatgtattgttccaaaacatttttagacgattccaacaaacgaaaggtattggcgattgattttggaaacggtgcggacctggaaaaatacttttatggagagattgcgttattggtagcgacggatccggatgctgatgctatagctagaggaaatgaaagatacaacaaattaaactctggaattaaaaccaagtactacaaatttgactacattcaggaaactattcgatccgatacatttgtctctagtgtcagagaagtattctattttggaaagtttaatatcatcgactggcagtttgctatccattattcttttcatccgagacattatgctaccgtcatgaataacttatccgaactaactgcttctggaggcaaggtattaatcactaccatggacggagacaaattatcaaaattaacagataaaaagacttttataattcataagaatttacctagtagcgaaaactatatgtctgtagaaaaaatagctgatgatagaatagtggtatataatccatcaacaatgtctactccaatgactgaatacattatcaaaaagaacgatatagtcagagtgtttaacgaatacggatttgttcttgtagataacgttgatttcgctacaattatagaacgaagtaaaaagtttattaatggcgcatctacaatggaagatagaccgtctacaaaaaactttttcgaactaaatagaggagccattaaatgtgaaggtttagatgtcgaagacttacttagttactatgttgtttatgtcttttctaagcggtaaataataatatggtatgggttctgatatccccgttctaaatgcattaaataattccaatagagcgatttttgttcctataggaccttccaactgtggatactctgtattgttaatagatatattaatacttttgtcgggtaacagaggttctacgtcttctaaaaataaaagtttgataacatctggcctgttcataaataaaaacttggcgattctatatatactcttattatcaaatctagccattgtcttatagatgtgagctactgtaggtgtaccatttgattttctttctaatactatatatttctctcgaagaagttcttgcacatcatctgggaataaaatactactgttgagtaaatcagttattttttttatatcgatattgatggacatttttatagttaaggataataagtatcccaaagtcgataacgacgataacgaagtatttatacttttaggaaatcacaatgactttatcagatcaaaattaacaaaattaaaggagcatgtatttttttctgaatatattgtgactccagatacatatggatctttatgcgtcgaattaaatgggtctagttttcagcacggtggtagatatatagaggtggaggaatttatagatgctggaagacaagttagatggtgttctacatccaatcatatatctgaagatatgcacactgataaatttgtcatttatgatatttatacgtttgattcgttcaagaataaacgattggtatttgtacaggtgcctccatcattaggagatgatagctatttgactaatccgttattgtctccgtattatcgtaattcagtagccagacaaatggtcaatgatatgatttttaatcaagattcatttttaaaatatttattagaacatctgattagaagccactatagagtttctaaacatataacaatagttagatacaaggataccgaagaattaaatctaacgagaatatgttataatagagataagtttaaggcgtttgtattcgcttggtttaacggcgtttcggaaaatgaaaaggtactagatacgtataaaaaggtatctaatttgatataatgaattcagtgactgtatcacacgcgccatatactattacttatcacgatgattgggaaccagtaatgagtcaattggtagagttttataacgaagtagccagttggctgctacgagacgagacgtcgcctattcctgataagttctttatacagttgaaacaaccgcttagaaataaacgagtatgtgtgtgtggtatagatccgtatccgaaagatggaactggtgtaccgttcgaatcaccaaattttacaaaaaaatcaattaaggagatagcttcatctatatctagattaaccggagtaattgattataaaggttataaccttaatataatagacggggttataccctggaattattacttaagttgtaaattaggagaaacaaaaagtcacgcgatctactgggataagatttccaagttactgctgcagcatataactaaacacgttagtgttctttattgtttgggtaaaacagatttctcgaatatacgggcaaagttagaatccccggtaactaccatagtcggatatcatccagcggctagagaccgccaattcgagaaagatagatcatttgaaattatcaacgttttactggaattagacaacaaggcacctataaattgggctcaagggtttatttattaatgctttagtgaaattttaacttgtgttctaaatggatgcaactattagaggtaatgatgttatctttgttcttaagactataggtgtcccgtcagcgtgcagacaaaatgaagatccaagatttgtagaagcatttaaatgcgacgagttagaaagatatattgagaataatccagaatgtacactattcgaaagtcttagggatgaggaagcatactctatagtcagaattttcatggatgtagatttagacgcgtgtctagacgaaatagattatttaacggctattcaagattttattatcgaggtgtcaaactgtgtagctagattcgcgtttacagaatgcggtgccattcatgaaaatgtaataaaatccatgagatctaatttttcattgactaagtctacaaatagagataaaacaagttttcatattatctttttagacacgtataccactatggatacattgatagctatgaaacgaacactattagaattaagtagatcatctgaaaatccactaaccagatcgatagacactgccgtatataggagaaaaacaactcttcgggttgtaggtactaggaaaaatccaaattgcgacactattcatgtaatgcaaccaccgcatgataatatagaagattacctattcacttacgtggatatgaacaacaatagttattacttttctctacaacgacgattggaggatttagttcctgataagttatgggaaccagggtttatttcattcgaagacgctataaaaagagtttcaaaaatattcattaattctataataaactttaatgatctcgatgaaaataattttacaacggtaccactggtcatagattacgtaacaccttgtgcattatgtaaaaaacgatcgcataaacatccgcatcaactatcgttggaaaatggtgctattagaatttacaaaactggtaatccacatagttgtaaagttaaaattgttccgttggatggtaataaactgtttaatattgcacaaagaattttagacactaactctgttttattaaccgaacgaggagaccatatagtttggattaataattcatggaaatttaacagcgaagaacccttgataacaaaactaattctgtcaataagacatcaactacctaaggaatattcaagcgaattactctgtccgaggaaacgaaagactgtagaagctaacatacgagacatgttaatagattcagtggagaccgatacctatccggataaacttccgtttaaaaatggtgtattggacctggtagacggaatgttttactctggagatgatgctaaaaaatatacgtgtactgtatcaaccggatttaaatttgacgatacaaagttcgtcgaagacagtccagaaatggaagagttaatgaatatcattaacgatatccaaccattaacggatgaaaataagaaaaatagagagttgtacgaaaaaactttatctagttgtttatgcggtgctaccaaaggatgtttaacattcttttttggagaaactgcaactggaaagtcgacaaccaaacgtttgttaaagtctgctatcggtgacctgtttgttgagacgggtcaaacaattttaacagatgtattggataaaggacctaatccatttatcgctaacatgcatttgaaaagatctgtattctgtagcgaactacctgattttgcctgtagtggatcaaagaaaattagatctgacaatattaaaaagttgacagaaccttgtgtcattggaagaccgtgtttctccaataaaattaataatagaaaccatgcgacaatcattatcgatactaattacaaacctgtctttgataggatagataacgcattaatgagaagaattgccgtcgtgcgattcagaacacacttttctcaaccttctggtagagaggctgctgaaaataatgacgcgtacgataaagtcaaactattagacgaggggttagatggtaaaatacaaaataatagatatagattcgcatttctatacttgttggtgaaatggtacaaaaaatatcatgttcctattatgaaactatatcctacaccggaagagattccggactttgcattctatctcaaaataggtactctgttagtatctagctctgtaaagcatattccattaatgacggacctctccaaaaagggatatatattgtacgataatgtggttactcttccgttgactactttccaacagaaaatatccaagtattttaattctagactatttggacacgatatagagagcttcatcaatagacataagaaatttgccaatgttagtgatgaatatctgcaatatatattcatagaggatatttcatctccgtaaatatatgctcatatatttatagaagatatcacatatctaaatgaataccggaatcatagatttatttgataatcatgttgatagtataccaactatattacctcatcagttagctactctagattatctagttagaactatcatagatgagaacagaagcgtgttattgttccatattatgggatcaggtaaaacaataatcgctttgttgttcgccttggtagcttccagatttaaaaaggtttacattctagtgcctaatattaacattttgaaaatttttaattataatatgggtgtagctatgaacttgtttaatgacgaattcatagctgagaatatctttattcattccacaacaagtttttattctcttaattataacgataacgtcattaattataacggattatctcgctacaataactctatttttatcgttgatgaggcacataatatctttgggaataatactggagaacttatgaccgtgataaaaaataaaaacaagattccttttttactattgtctggatctcccattactaacacacctaatactctgggtcatattatagatttaatgtccgaagagacgatagattttggtgaaattattagtcgtggtaagaaagtaattcagacacttcttaacgaacgaggtgtgaatgtacttaaggatttgcttaaaggaagaatatcatattacgaaatgcctgataaagatctaccaacgataagatatcacggacgtaagtttctagatactagagtagtatattgtcacatgtctaaacttcaagagagagattatatgattactagacgacagctatgttatcatgaaatgtttgataaaaatatgtataacgtgtcaatggcagtattgggacaacttaatctgatgaataatttagatactttatttcaggaacaggataaggaattgtacccaaatctgaaaataaataatggcgtgttatacggagaagaattggtaacgttaaacattagttccaaatttaaatactttattaatcggatacagacactcaacggaaaacattttatatacttttctaattctacatatggcggattggtaattaaatatatcatgctcagtaatggatattctgaatataatggttctcagggaactaatccacatatgataaacggcaaaccaaaaacatttgctatcgttactagtaaaatgaaatcgtctttagaggatctattagatgtgtataattctcctgaaaacgatgatggcagtcaattgatgtttttgttttcgtcaaacattatgtccgaatcctatactctgaaagaggtaaggcatatttggtttatgactatcccagatactttttctcaatacaaccaaattcttggacgatctattagaaaattctcttacgccgatatttctgaaccagttaatgtatatcttttagccgccgtatattccgatttcaatgacgaagtgacgtcattaaacgattacacacaggatgaattaattaatgttttaccatttgacatcaaaaagctgttgtatctaaaatttaagactaaagaaacgaatagaatatactctattcttcaagagatgtctgaaacgtattctcttccaccacatccatcaattgtaaaagttttattgggagaattggtcagacaatttttttataataattctcgtattaagtataacgataccaagttacttaaaatggttacatcagttataaaaaataaagaagacgctaggaattacatagatgatattgtaaacggtcacttctttgtatcgaataaagtatttgataaatctcttttatacaaatacgaaaacgatattattacagtaccgtttagactttcctacgaaccatttgtttggggagttaactttcgtaaagaatataacgtggtatcttctccataaaactgatgagatatataaagaaataaatgtcgagctttgttaccaatggataccttccagttacattggagccacacgagctgacgttagacataaaaactaatattaggaatgccgtatataagacgtatctccatagagaaattagtggtaaaatggccaagaaaatagaaattcgtgaagacgtggaattacctctcggcgaaatagttaataattctgtagttataaacgttccgtgtgtaataacctacgcgtattatcacgttggggatatagtcagaggaacattaaacatcgaagatgaatcaaatgtaactattcaatgtggagatttaatctgtaaactaagtagagattcgggtactgtatcatttagcgattcaaagtactgcttttttcgaaatggtaatgcgtatgacaatggcagcgaagtcactgccgttctaatggaggctcaacaaggtatcgaatctagttttgtttttctcgcgaatatcgttgactcataaaaaagagaatagcggtaagtataaacacgaatactatggcaataattgcgaatgttttattcccttcgatatatttttgataatatgaaaaacatgtctctctcaaatcggacaaccatctcataaaatagttctcgcgcgctggagaggtagttgctgctcgtataatctccccagaataatatacttgcgtgtcgtcgttcaatttatacggatttctatagttctctgttatataatgcggttttccatcatgattagacgacgacaatagtgttctaaatttagatagttgatcagaatgaatgtttattggcgttggaaaaattatccatacagcgtctgcagagtggttgatagttgttcctagatatgtaaaataatccaacttactaggcagcaaattgtctagataaaatactgaatcaaacggtgcagacgtattggtggatctaatggaatccaattgattaactatcttttgaaaatatacatttttatgatccgatacttgtaagaatatagaaataatgataagtccatcatcgtgtttttttgcctcttcataagaactatattttttcttattccaatgaacaagattaatctctccagagtatttgtacacatctatcaagtgattggatccataatcgtcttcctttccccaatatatacgtagtgatgataacacatattcattggggagaaaccctccacttatatatcctcctttaaaattaatccttactagttttccagtgttctggatagtggttggtttcgactcattataatgtatgtctaacggcttcaatcgcgcgttagaaattgcttttttagtttctatattaataggagatagttgttgcggcatagtaaaaatgaaatgataactgtttaaaaatagctcttagtatgggaattacaatggatgaggaagtgatatttgaaactcctagagaattaatatctattaaacgaataaaagatattccaagatcaaaagacacgcatgtgtttgctgcgtgtataacaagtgacggatatccgttaataggagctagaagaacttcattcgcattccaagcgatattatctcaacaaaattcagattctatctttagagtatccactaaactattacggtttatgtactacaatgaactaagagaaatctttagacggttgagaaaaggttctatcaacgatatcgatcctcactttgaagagttaatattattgggtggtaaactagataaaaaggaatctattaaagattgtttaagaagagaattaaaagaggaaagtgatgaacgtataacagtaaaagaatttggaaatgtaattctaaaacttacaacacgggataaattatttaataaagtatatataagttattgcatggcgtgttttattaatcaatcgttggaggatttatcgcatactagtatttacaatgtagaaattagaaagattaaatcattaaatgattgtattaacgacgataaatacgaatatctgtcttatatttataatatgctagttaatagtaaatgaacttttacagatctagtataattagtcagattattaagtataatagacgactagctaagtctattatttgcgaggatgactctcaaattattacactcacggcattcgttaaccaatgcctatggtgtcataaacgagtatccgtgtccgctattttattaactactgataacaaaatattagtatgtaacagacgagatagttttctctattctgaaataattagaactagaaacatgtctagaaagaaacgattatttctgaattattccaattatttgtccaaacaggaaagaagtatactatcgtcatttttttctctagatccagctactactgataatgatagaatagatgctatttatccgggtggcatacccaaaaggggtgagaatgttccagagtgtttatccagggaaattaaagaagaagttaatatagacaattcttttgtattcatagacactcggttttttattcatggcatcatagaagataccattattaataaattttttgaggtaatcttctttgtcggaagaatatctttaacgagtgatcaaatcattgatacatttaaaagtaatcatgaaatcaaggatctaatatttttagatccgaattcaggtaatggactccaatacgaaattgcaaaatatgctctagatactgcaaaactcaaatgttatggccatagaggatgttattacgaatcattaaaaaaattaactgaggatgattgattagaaaatataaattaatttaccatcgtgtatttttataacgggattgtccggcatatcatgtagatagttaccgtctacatcgtatactcgaccatctacgcctttaaatcctctatttattgacattaatctattagaattggaataccaaatattagtaccctcaattagtttattggtaatattttttttagacgatagatcgatggctcttgaaaccaaggttttccaaccggactcattgtcgatcggtgagaagtctttttcattagcatgaatccattctaatgatgtatgtttaaacactctaaacaattggacaaattcttttgatttgctttgaatgatttcaaataggtcttcgtctacagtaggcataccattagataatctagccattataaagtgcacgtttacatatctacgttctggaggagtaagaacgtgactattgagacgaatggctcttcctactatctgacgaagagacgcctcgttccatgtcatatctaaaatgaagatatcattaattgagaaaaaactaataccctcgcctccactagaagagaatacgcatgttttaatgcattctccgttagtgtttgattcttggttaaactcagccaccgccttgattctagtatcttttgttctagatgagaactctatattagagataccaaagactttgaaatatagtaataagatttctattcctgactgattaacaaatggttcaaagactagacatttaccatgggatgctaatattcccaaacatacatctataaatttgacgcttttctcttttaattcagtaaatagagagatatcagccgcactagcatcccctttcaatagttctccctttttaaaggtatctaatgcggatttagaaaactctctatctcttaatgaatttttaaaatcattatatagtgttgctatctcttgcgcgtattcgcccggatcacgattttgtctttcaggaaagctatcgaacgtaaacgtagtagccatacgtctcagaattctaaatgatgatatacctgtttttatttcagcgagtttagccttttgataaatttcttcttgctttttcgacatattaacgtatcgcattaatactgttttcttagcgaatgatgcagacccttctacgtcatcaaaaatagaaaactcgttattaactatgtacgaacataggcctcctagtttggagactaattctttctcatcaactagacgtttattctcaaatagcgattggtgttgtaaggatcctggtcgtagtaagttaaccaacatggtgaattcttgcacactattaacgataggtgtagccgataaacaaatcatcttatggttttttaatgcgatggtcttagataaaaaattatatactgaacgagtaggacggatcttaccatcttctttgattaatgatttagaaatgaagttatgacattcatcaataatgacgcatattctactcttggaattaatagttttgatattagtaaaaaatttatttctaaaattttgatcatcgtaattaataaaaatacaatccttcgttatctctggagcgtatctgagtatagtgttcatccaaggatcttctatcaaagcctttttcaccaataagataatagcccaattcgtataaatatccttaagatgtttgagaatatatacagtagtcattgttttaccaacacccgtttcatggaacaataaaagagaatgcatactgtctaatcctaagaaaactcttgctacaaaatgttgataatccttgaggcgtactacgtctgttcccatcatttcaacaggcatattagtagttctgcgcaatgcataatcgatataggccgcgtgtgatttactcatttatgagtgataagtaataactatgttttaaaaatcacagcagtagtttaactagtcttctctgatgtttgttttcgatactttttgaatcagaagtcatactagaataaagcaacgagtgaacgtaatagagagcttcgtatactctattcgaaaactctaagaacttattaatgaattccgtatccactggattgtttaaaatactaaattgaacactgttcacatccttccaagaagaagacttagtgacggacttaacatgagacataaataaatccaaattttttttacaaacatcactagccaccataatggcgctatctttcaaccagctatcgcttacgcattttagcagtctaacatttttaaagagactacaatatattctcatagtatcgattacacctctaccgaataaagttggaagtttaataatacaatatttttcgtttacaaaatcaaataatggtcgaaacacgtcgaaggttaacatcttataatcgctaatgtatagattgttttcagtgagatgattattagatttaatagcatctcgttcacgtttgaacagtttattgtgtgcgctgaggtcggcaactacggcgtccgctttagtactcctcccataatactttacgctattaatctttaaaatttcatagactttatctagatcgctttctggtaacatgatatcatgtgtaaaaagttttaacatgtcggtcggcattctatttagatcattaactctagaaatctgaagaaagtaattagctccgtattccagactaggtaatgggcttttacctaaagacaagttaagttctggcaatgtttcataaaatggaagaaggacatgcgttccctcccggatattttttacaatttcatccatttacaactctatagtttgttttcattattattagttattatctcccataatcttggtaatacttaccccttgatcgtaagataccttatacaggtcattacatacaactaccaattgtttttgtacataatagattggatggttgacatccatggtggaataaactactcgaacagatagtttatctttccccctagatacattggccgtaatagttgtcggcctaaagaatatctttggtgtaaagttaaaagttagggttcttgttccattattgctttttgtcagtagttcattataaattctcgagatgggtccgttctctgaatatagaacatcatttccaaatctaacttctagtctagaaataatatcggtcttattcttaaaatctattcccttgatgaagggatcgttaatgaacaaatccttggcctttgattcggctgatctattatctccgttatagacgttacgttgactagtccaaagacttacaggaatagatgtatcgatgatgttgatactatgtgatatgtgagcaaagattgttctcttagtggcatcactatatgttccagtaatggcggaaaactttttagaaatgttatatataaaagaattttttcgtgttccaaacattagcagattagtatgaagataaacactcatattatcaggaacattatcaatttttacatacacatcagcatcttgaatagaaacgataccatcttctggaacctcaacaatctcggcagactccggataaccagtcggtgggccatcactaacaataactagatcatccaacaatctactcacatatgcatctatataatctttttcatcttgtgagtaccctggatacgaaataaatttattatccgtatttccataataaggtttagtataaacagagagcgatgttgccgcatgaacttcagttacagtcgccgttggttggtttatttgacctattactctcctaggtttctctataaacgatggtttaatttgtacattcttaaccatatatccaataaagctcaattcaggaacataaacaaattctttgttgaacgtttcaaagtcgaacgaagagtcacgaataacgatatcggatactggattgaaggttaccgttacggtaatttttgaatcggatagtttaagactgctgaatgtatcttccacatcaaacggagttttaatataaacgtatactgtagatggttctttaatagtgtcattaggagttaggccaatagaaatatcattaagttcactagaatatccagagtgtttcaaagcaattgtattattgatacaattattatataattcttcgccctcaatttcccaaataacaccgttacacgaagagatagatacgtgattaatacatttatatccaacatatggtacgtaaccgaatcttcccatacctttaacttctggaagttccaaactcagaaccaaatgattaagcgcagtaatatactgatccctaatttcgaagctagcgatagcctgattgtctggaccatcgtttgtcataactccggatagagaaatatattgcggcatatacaaagttggaatttgactatcgactgcgaagacattagaccgtttaatagagtcatccccaccgatcaaagaattaatgatagtattattcattttctatttaaaatggaaaaagcttacaataaactccgtagagaaatatctataatttgtgagttttccttaaagtaacagcttccgtaaacgccgtctttatctcttagtaggtttattgtatttatgaccttttccttatcttcatagaatactaaaggcaacaaagaaatttttggttcttctctaagagctacgtgagacttaaccatagaagccaacgaatccctacatattttagaacagaaatacccaacttcaccacccttgaatgtctcaatactaataggtctaaaaaccaaatcttgattacaaaaccaacacttatcaattacactatttgtcttaatagacacatctgccatagatttataatactttggtagtatacaagcgagtgcttcttctttagcgggcttaaagactgctttaggtgctgaaataaccacatctggaaggcttactcgcttagccatttaattacggaactatttttttatacttctaatgagcaagtagaaaacctctcatctacaaaaacatactcgtgtccataatcctctaccatagttacacgttttttagatctcatatgtgctaaaaagttttcccatactaattggttactattatttttcgtataatttttaacagtttgaggttttagatttttagttacagaagtgatatcgaatattttatccaaaaagaatgaataattaattgtcttagaaggagtgttttcttggcaaaagaataccaagtgcttaaatatttctactacttcattaatcttttctgtactcagattcagtttctcatcttttacttgattgattatttcaaagactaacttataatcctttttatttattctctcgttagccttaagaaaactagatacaaaatttgcatctacatcatccgtggatatttgatttttttccatgatatccaagagttccgagataatttctccagaacattgatgagacaataatctccgcaatacatttctcaaatgaataagtttattagacacatggaagtttgactttttttgtacctttgtacatttttgaaatacagactcgcaaaaaatacaatattcatatccttgttcagatactataccgttgtgtctacaaccgctacataatcgtagattcatgttaacactctacgtatctcgtcgtccaatattttatataaaaacattttatttctagacgttgccagaaaatcctgtaatatttttagttttttgggctgtgaataaagtatcgccctaatatggttaccgtcctccgccaatatagtagttaaattatccgcacatgcagaagaacaccgcttaggcggattcagtacaatgttatatttttcgtaccaactcatttaaatatcataatctaaaatagttctgtaatatgtctagcgctaatatattgatcataatcctgtgcataaattaagatacaacaatgtctcgaaatcatcgacatggcttcttccatagttagaagatcgtcgtcaaagttagcaacgtgattcatcaacatttgctgttttgaggcagcaaatactgaaccgtcgccattcaaccattcataaaaaccatcgtctgaatccattgataatttcttgtactggtttttgagagctcgcatcaatctagcatttctagctcccggattgaaaacagaaagaggatcgtacatccagggtccattttctgtaaatagaatcgtataatgtcccttcaagaagatatcagacgatccacaatcaaagaattggtctccgagtttgtaacaaactgcggactttaacctatacatgataccgtttagcatgatttctggtgatacgtcaatcggagtatcatctattagagatctaaagccggtgtaacattctccaccaaacatattcttattctgacgtcgttctacataaaacatcattgctccattaacgataacaggggaatgaacagcactacccatcacattagttcccaatggatcaatgtgtgtaactccagaacatcttccatatcctatgttaggaggagcgaacaccactcttccactattgccatcgaatgccatagaataaatatccttggaattgatagaaatcggactgtcggatgttgtgatcatcttcataggattaacaactatgtatggtgccgcctgaagtttcatatcgtaactgatgccgtttataggtctagccacagaaaccaacgtaggtctaaatccaactatagacaaaatagaagccaatatctgttcttcatctgtcataacttgagagcatccagtatgaataatcttcattagatggggatctaccgcatcatcatcgttacaataaaaaattcccattctaatgttcataattgcttttctaatcatggtatgcatgtttgctctctgaatctctgtggaaattagatctgatacacctgtaatcactatcggattatcctccgtaagacgattaaccaacaacatataattataagactttacttttctaaattcataaagttgctggattaggctataggtgtctccatgtacatacgcgttctcgagcgcaggaagtttaataccgaatagtgccatcagaataggatgaatatagtaattagtttctggttttctataaataaaagacaaatcttgtgaactagacatatcggtaaaatgcatggattggaatcgtgtagtcgacagaagaatatgatgattagatggagagtatattttatctaactctttgagttggtcaccgattctaggactagctcgagaatgaataagtactaaaggatgagtacatttcacagaaacactagcattgttcaatgtgctctttacatgggtaaggagttgaaatagctcgtttctatttgttctgacaatatttagtttattcataatgttaagcatatcctgaatagtaaagttagatgtgtcatacttgttagtagttagatatttagcaattgcattcccatcatttctcaatctcgtactccaatcatgcgtggatgctacttcgtcgatggaaaccatacaatcctttttgataggctgttgagattgattatttcctgcacgtttaggtttggtacgttgatttctagcccctgcggatataaagtcatcgtctacaattttggataatgaattgcatacactacaagacaaagatttatcagaagtgtgaatatgatcttcatctaccaaagaaagagtttgattagtataactagattttagtcctgcgttagatgttaaaaaaacatcgctattgaccacggcttccattatttatattcgtagtttttactcgaaagcgtgattttaatattcaatcttattacttttggaatcgttcaaaacctttgactaattgtagaatttgatctattgccctacgcgtatactcccttgcatcatatacgttcgtcaccagatcgtttgtttcggcctgaagttggtgcatatctctttcaacattcgacatgagatccttaagggccatatcgtctagattttgttgagatgctgctcctggatttggattttgttgtgctgttgtacatactgtaccaccagtaggtgtaggagtacatacagtggccacaataggaggttgaggaggtgtaaccgttggagtagtacaagaaatacttccatccgattgttgtgtacatgtagttgttggtaacgtctgagaaggttgggtagatggcggcgtcgtcgtcttttgatctttattaaatttagagataatatcctgaacagcattgctcggcgtcaacgctggaaggagtgaactcgccggcgcatcagtatctgcagacagccaatcaaaaagattagacatatcagatgatgtattagtttgttgtcgtggttttggtgtaggagccggtgtagctgttggaaccggctgtggagttatatgaatagttggttgtagcggttggataggctgtctgctggcggccatcatattatctctagctagttgttctcgcaactgtctttgataatacgactcttgagactttagtcctatttcaatcgcttcatcctttttcgtatccggatccttttcttcagaataatagattgacgactttggtgtagaggattctgccagcccctgtgagaacttgttaaagaagtccatttaaggctttaaaattgaattgcgattataagattaaatggcagacacagacgatattatcgactatgaatccgatgatctcaccgaatacgaggatgatgaagaagaggaagaagatggagagtcactagaaactagtgatatagatcccaaatcttcttataagattgtagaatcagcatccactcatatagaagatgcgcattccaatcttaaacatatagggaatcatatatctgctcttaaacgacgctatactagacgtataagtctatttgaaatagcgggtataatagcagaaagctataacttgcttcaacgaggaagattacctctagtttcagaattttctgacgaaacgatgaagcaaaatatgctacatgtaattatacaagagatagaggagggttcttgtcctatagtcatcgaaaagaacggagaattgttgtcggtaaacgattttgacaaagatggtctaaaattccatctagactatattatcaaaatttggaaacttcaaaaacgatattagaatttatacgaatatcgttctctaaatgtcacaatcaagtctcgcatgttcagcaatttattgtcgtactttatatcgtgttcattaacgatatcttgcaaaatagtaatgattctatcttccttcgatagatattcttcagagattattgtcttatattctttcttgttatcagatatgaatttgataagactttgaacattattgatacccgtctgtttaattttttctacagatattttagttttggcagattctatcgtatctgtcaatagacatccaacatcgacattcgacgtcaattgtctataaatcaacgtataaattttagaaataacattagcgaattgttgtgcattgatgtcgttattctgaaacagtatgattttaggtagcattttcttaacaaagagaacgtatttattgttactcagttgaacagatgatatatccagattactaacgcatctgattccatataccaaactttcagaagaaatggtgtacaattgtttgtattcattcaatgtctctttttcagaaattagtttagagtcgaatactgcaataattttcaagagatagttttcatcagataagattttatttagtgtagatatgataaaactattgttttgttggagaacttgatacgccgcgttctctgtagtcgacgctctcaaatgggaaacaatctccattatttttttggaatcggatacaatatcttcggtatcttgacgcaatctagtatacatagagttaagagaaattagagtttgtacattaagcaacatgtctctaaatgtggctgcaaacttttccttttccacatcatctagtttattatataccgatttcacaacggcaccagatttaaggaaccagaatgaaaaactctgataactacaatatttcatcatagttacgattttatcatcttctatagttggtgtaatagcgcatacctttttctccaagactggaaccaacgtcataaaaatgtttaaatcaaaatccatatcaacatctgatgcgctaagaccagtctcgcgttcaagattatctttactaatggtgacgaactcatcgtatagaactctaagtttgtccattatttatttacagatttagttgtttaatttatttgtgctcttccagagttgggatagtatttttctaacgtcggtattatattattaggatctacgttcatatgtatcataatattaatcatccacgttttgataaatctatctttagcttctgaaataacgtatttaaacaaaggagaaaaatatttagctacggcatcagacgcaataacattttttgtaaatgtaacgtatttagacgacagatcttcgttaaaaagttttccatctatgtagaatccatcggttgttaacaccattcccgcgtcagattgaataggagtttgaatagtttgttttggaaatagatccttcaataacttatagttgggtgggaaaaaatcgattttatcactagactctttcttttttactatcattacctcatgaactatttcttgaatgagtatatgtattttctttcctatatcggacgcgttcattggaaaatataccatgtcgttaactataagaatatttttatcctcgtttacaaactgaataatatcagatgtagttcgtaaacgaactatatcatcaccagcacaacatctaactatatgatatccactagtttcctttagtcgtttattatcttgttccatattagcagtcattccatcatttaagaaggcgtcaaagataatagggagaaatgacattttggattctgttacaactttaccaaaattaaggatatacggacttactatctttttctcaacgtcgatttgatgaacacacgatgaaaatgtacttcgatgagattgatcatgtagaaaacaacaagggatacaatatttccacatatcatgaaatatattaagaaatcccaccttattatatttccccaaaggatccatgcatgtaaacattatgccgttatcattaataaagacttctttctcatcggatctgtaaaagttgttactgatttttttcattccaggatctagataattaataatgatgggttttctattcttattctttgtattttggcatatcctagaccagtaaacagtttccactttggtaaaatcagcagacttttgaacgctattaaacatggcattaatggcaataactaaaaatgtaaaatatttttctatgttaggaatatggtttttcactttaatagatatatggtttttggccaaaatgatagatatttttttatccgaggatagtaaaatattattagtcgccgtctctataaaaatgaagctagtctcgatatccaattttattctagaattgataggagtcgccaaatgtaccttatacgttatatctcccttgatgcgttccatttgtgtatctatatcggacacaagatctgtaaatagttttacgttattaatcatcacggtatcgccgtcgctagataacgctaatgtaccatccaagtcccaaatggagagatttaactgttcatcgtttagaataaaatgattaccggtcatattaataaagtgttcatcgtatctagataacaacgacttataattaatgtccaagtcttgaactcgctgaatgatcttttttaacccagttagttttagattggtacgaaatatattgttaaactttgattctacagtaatgtccaaatctagttgtggaaatacttccatcaacattgtttcaaacttgataatattattatctacatcttcatacgatccaaattccggaatagatgtatcgcacgctctggccacccagataaccaaaaagtcacacgctccaggatatacattgtataaaaagctatcgttttttagtagtgtttttttctgagtatatacgaagggattaaaaatagtattatcaacgtaactatattccaaattattcttatgagaatagataataatatcgtccttaatatctaacaaatttcctaaatatccctttaattgagtcattcgaagcgtcaatagaatatgtctcttaactatttccggctgttgtatatttaaatgacttcgtaaaaaataatatatgggcgacttctcatctatgtaatcatatggagtgagatatagggctcgttctacctcctgccccttacccacctgtaataccaattgcggacttactatatatcgcatatttatatcgtggggtaaagtgaaaatctactaccgatgatgtaagtcttacaatgttcgaaccagtaccagatcttaatttggaggcctccgtagaactaggggaggtaaatatagatcaaacaacacctatgataaaggaaaatagcggttttatatcccgtagtagacgtctattcgcccatagatctaaggatgatgagagaaaactagcactacgattctttttacaaagactttattttttagatcatagagagattcattatttgttcagatgcgttgacgctgtaaaagacgtcactattaccaaaaaaaataacattatcgtggcgccttatatagcacttttaactatcgcatcaaaaggatgcaaacttacagaaacaatgattgaagcattctttccagaactatataatgaacatagtaagaaatttaaattcaactctcaagtatccatcatccaagaaaaactcggataccagtttggaaactatcacgtttatgattttgaaccgtattactctacagtagctctggctattcgagatgaacattcatctggcatttttaatatccgtcaagagagttatctggtaagttcattatctgaaataacatatagattttatctaattaatctaaaatctgatcttgttcaatggagtgctagtacgggcgctgtaattaatcaaatggtaaatactgtattgattacagtgtatgaaaagttacaactggtcatagaaaatgattcacaatttacatgttcattggctgtggaatcaaaacttccaataaaattacttaaagatagaaatgaattatttacaaaattcatcaacgagttaaaaaagaccagttcattcaagataagcaaacgcgataaggatacgctactaaaatattttacttaggactggagttagaatttatagacgactcatttcgtttatcattattagtattcttcttgttatcttgttcagaaatatacagcaatgctatgcctaatactaaatacattatcatgcttgcaatggctctaacaacgacgaaccaaaatgaatttggtcgtagcttttgttcacaaaaatacataaagaaatgtctacataaatctatggcgccattggctacttgaaatagcgccagtcctcctacagattttaatatagctgtataacatgacatttattcatcatcaaaagagacagagtcaccatctgtcatatttagattttttttcatgtgttcaaagtatcctctactcatttcattataatagtttatcatacttagaattttaggacggatcaatgagtaagacttgactagatcgtcagtagtaatttgtgcatcgtctattctgcatccgcttcgtcgaataatgtatagcatcgctttgagattctccatagctatcaagtctttatacaatgacatggaaatatctgtgaatactttatacttctccaacatcgatgccttaacatcatcgcctactttagcattgaaaatacgttctattgtgtagatggatgtagcaagatttttaaacaacaatgccattttacacgatgattgcctcaagtctccaatcgtttgtttagaacgattagctacagagtccaatgcttggctgactagcatattattatctttagaaattgtattcttcaatgaggcgtttatcatatctgtgatttcgttagtcatattacagtctgactgggttgtaatgttatccaacatatcacctatggatacggtacacgtaccagcatttgtaataatcctatctaagatgttgtatggcattgcgcagaaaatatcttctcctgtaatatttccactctcgataaatctactcagattattcttaaatgccttattctctggagaaaagatatcagtgtccatcatttcattaatagtatacgcagaaaagataccacgagtatcaattctatccaagatacttatcggttccgagtcacagataatggtttcctctccttcgggagatcctgcatagaaatatctaggacaatagtttctatactgtctgtaactctgataatctctaaagtcactaactgataccatgaaattgagaagatcaaacgctgaagtaattaatttttctgcctcgtttttactacaactagttttcatcaatgtagtgacgatgtattgtttagttactcttggtctaatactgatgatagagatattattacttcccataatggatcttctagtagtcaccttaaagcccattgatgcaaatagcagatagataaagtcttggtatgactcctttctaatatagtacggactacctttgtcacccaactttatacccacataagccataacaacctctttaatagccgtttcatgaggtttatcagccatgagcctgagtagttggaagaatctcatgaatcctgtctcagaaagtcctatatgcatgatagatttatctttcctgggaaactctcgtatagtcatagatgaaatactcttcaaagtttctgaaataagattagtaacagtcttacctccgactactctaggtaacaaacaaactctaataggtgttttctctgcggagataatatcagaaaggatagagcaataagtagtattattgtgattataaagaccgaatacataacaggtagaatttataaacatcatgtcctgaaggtttttagacttgtattcctcgtaatccataccgtcccaaaacatggatttggtaactttgatagccgtagatctttgttccttcgccaacaggttaaagaaattaataaagaatttgtggtttctacctatgtctacaaattgcacgtttggaagcgccacggttacattcactgcagcattttgaggatcgcgagtatgaagtacgatgttattgtttactggtatatctggaaagaattctaccagtctaggaataagagattgatatcgcatagaaatacaaaagttcataatctcatcatctaagagcattttgttaccattgtaataaatatccactctgtcatatgtataaatgaagtactgttcaaacatgatgagatgtttatatgttggcatagtagtgagatctacgtttggtaatggcaatgtattaagattaactccataatgtctagcagcatctgcgatgttataagcgttgtcaaagcggggtcgatcttgtgctgttatatattgtctaacacctataagattatcaaaatcttgtctgcttaatacaccgttaacaatttttgccttgaattcttttattggtgcattaataacatccttatagaggatgttaaacaaataagtgttatcaaagttaagatctggatatttcttttctgctagaacatccattgagtcggagccatctggtttaatataaccaccgataaatctagctctgtattctgtatccgtcaatctaatattaagaaggtgttgagtgaaaggtggaagatcgtaaaagctgtgagtattaatgataggattagtttccgaactaatgttaattggggtattaataatatctatatttccagcgttaagtgtaacattaaacagttttaattcacgtgacgtggtatcaattaaataattaatgcccaatttggatatagcagcctgaagctcatcttgtttagttacggatcctaatgagttattaagcaatatatcgaacggatgaacgaaggttgttttaagttggtcacatactttgtaatctagacatagatgcggaagaacggtagaaactatacgaaataaatattcagagtcctctaattgatcaagagtaactattgacttaataggcatcatttatttagtattaaatgacgaccgtaccagtgacggatatacaaaacgatttaattacagagttttcagaagataattatccatctaacaaaaattatgaaataactcttcgtcaaatgtctattctaactcacgttaacaacgtggtagatagagaacataatgccgccgtagtgtcatctccagaggaaatatcctcacaacttaatgaagatctatttccagatgatgattctccggccactattatcgaacgagtacaacctcatactactattattgacgatactccacctcctacgtttcgtagagagttattgatatcggaacaacgtcaacaacgagaaaaaagatttaatattacagtatcgaaaaatgctgaagcaataatggaatctagatctatgatatcttctatgccaacacaaacaccatccttgggagtagtttatgataaagataaaagaattcagatgttggaggatgaagtggttaatcttagaaatcaacgatctaatacaaaatcatctgataatttagataattttaccagaatactatttggtaagactccgtataaatcaacagaagttaataagcgtatagccatcgttaattatgcaaatttgaacgggtctcccttatcagtcgaggacttggatgtttgttcagaggatgaaatagatagaatctataaaacgattaaacaatatcacgaaagtagaaaacgaaaaattatcgtcactaacgtgattattattgtcataaatattatcgagcaagcattgctaaaactcggatttgaagaaatcaaaggactgagtaccgatatcacttcagaaattatcgatgtggagatcggagatgactgcgatgctgtagcatcaaaactaggaatcggtaacagtccggttcttaatattgtattgtttatactcaagatattcgttaaacgaattaaaattatttaatttaatacattcccatatccagacaacaatcgtctggattaatctgttcctgtcgtctcataccggacgacatattaatctttttattagtaggcatctttttagatggtttctttttcccagcattaactgagtcgatacctagaagatcgtgattgatctctccgaccattccacgaacttctaattggccgtctctgacggtaccataaactattttaccagcattagtaacagcttggacaatctgaccatccatcgcattgtacgatgtagtagtaactgttgttctacgtctaggagcaccagaagtatttttggagcccttggatgttgatgtagaagaagacgaggattttgattttggtttacatgtaatacattttgtatcacatgcgccggcagtcacatctgtttgagaattaagattattgttgcctcctttgacggctgcatctccaccgatttgcgctagtagatttttaagctgtggtgtaatcttattaactgtttcgatataatcatcgtaactgcttctaacggctaaattttttttatccgccatttagaagctaaaaatatttttatttatgcagaagatttaactagattatacaatgaactaatatgatccttttccagattatttacaaacttggtattttttggttctggaggaggcgaatttaaattcggacttggatttggattttgtgggttcttgatcttattatacagcgcatataggatggcgacggtaactgctacgcaaataccgatcaacaaaagaataccaatcatttattgacaataacttcactattgatcaagtatgcaatatatcatcttttcactaaataagtagtaataatgattcaacaatgtcgagatatatggacgataataatttagttcatggaaatatcgctatgattggtatgaatgactccgctaactctgtggggcgcgcagtgctttccccacatagaataaattagcattccgactgtgataataataccaagtataaacgccataatactcaatactttccatgtacgagtgggactggtagacttactaaagtcaataaaggcgaagatacacgaaagaatcaaaagaatgattccagcgattagcacgccggaaaaataatttccaatcataagcatcatatccatttaactaataaaaattttaaatcgccgaatgaacaaagtggaatataaaccatataaaaacaatagtttgtactgcaaaaataatatctatttttgttttcgaagatatggtaaaattaaatagtagtacacagcatgttataactaacagcagcaacggctcgtaattacttatcatttactagacgaaaaggtggtgggatattttcttgctcaaataatacgaatatatcacccatccattttatgcgatgtttatatactctaatctttaatagatctatagacgacgggtttaccaacaatatagattttatcgattcatctaatttaaacccttccttaaacgtgaatgatctattatctggcataacgatgactctacccgatgaatcggacaatgtactgggccatgtagaataaattatcaacgaattatcgtctacgaacatttatatcatttgttttaattttagtacgcgaataaatagatataaaatagaaaataacagatattacaaccaatgttatggccgcgcccaaccaggtaggcagttttattttatcttttactacaggttctcctggatgtacgtcaccaacggcggacgtagttctagtacaattagacgtaagttccgcttgggaattttttaacgctaaagagttaacgttaatcgtgcacccaacgtatttacatctagttctttgaacatcttgattataatataaccattttctatctctagattcgtcggtgcactcatgtaaccaacataccctaggtcctaaatatttatctccggaattagattttggataattcgcgcaccaacaatttctatttcctttatgatcgttacaaaagacgtataatgccgtatccccaaaagtaaaataatcaggacgaataattctaataaactcagaacaatatctcgcatccatatgtttggagcaaatatcggaataagtagacatagccggtttccgttttgcacgtaaccattctaaacaattggggtttccaggatcgtttctacaaaatccagtcatgaaatcatcacaatgttctgtcttgtaattattattaaatatttttggacagtgtttggtatttgtcttagaacaacattttgccacgctatcactatcgcccaggagataatccttttttataaaatgacatcgttgcccggatgctatataatcagtagcgtgttttaaatccttaatatattcaggagttacctcgttctgataatagattaatgatccaggacgaaatttgaaagaactacatggttctccatgaattaatacatattgtttagcaaattcaggaactataaaactactacaatgatctatcgacataccatctatcaaacaaaacttgggtttaatttctcccggagatgtttcataatagtacgtataactttcttctgcaaacttaacagctctattatattcaggataattaaaacctaattccatatatttgtctcgtatatctgctattcctggtgctattttgattctattaagagtaacggctgcccccatttttaataatcgtcagtatttaaactgttaaatgttggtatatcaacatttaccttatttcccgcagtataaggtttgttgcaggtatactgttcaggaatggttacatttatactttttctatagtcctgtctttcgatgttcatcacatatgcaaagaacagaataaacaaaataatgtaagaaataatattaaatatctgtgaattcgtaaatacattgattgccataataattacagcagctacaatacatacaatagacattcccacagtgttgccattacctccacgatacatttgagttactaagcaataggtaataactaagctagtaagaggcaatagaaaagatgagataaatatcatcaatatagagattagaggagggctatatagagccaagacgaacaaaatcaaaccgagtaacgttctaacatcattatttttgaagattcccaaataatcattcattcctccataatcgttttgcatcatacctccatctttaggcataaacgattgctgctgttcctctgtaaataaatctttatcaagcactccagcacccgcagagaagtcgtcaagcatattgtaatatcttaaataactcatttatatattaaaaaatgtcactattaaagatggagtataatctttatgccgaactaaaaaaaatgacttgtggtcaacccctaagtctttttaacgaagacggggatttcgtagaagttgaaccgggatcatcctttaagtttctgatacctaagggattttacgcctctccttccgtaaagacgagtctagtatttgaaacattaacaacgaccgataataaaattactagtatcaatccaacaaatgcgccaaagttatatcctcttcaacgcaaagtcgtatctgaagtagtttctaatatgaggaaaatgatcgaatcaaaacgtcctctatacatcactcttcacttggcgtgtggatttggtaagactattaccacgtgttatcttatggctacacacggtagaaaaaccgtcatttgcgtacccaataaaatgttaatacatcaatggaagacacaggtagaggcagtcggattggaacataagatatccatagatggagtaagtagtctattaaaggaactaaagactcaaagtccggatgtattaatagtagtcagtagacatctgacaaacgatgccttttgtaaatatatcaataagcattatgatttgttcatcttggatgaatcacatacgtataatctgatgaacaatacagcagttacaagatttttagcgtattatcctccgatgatgtgttattttttaactgctacacctagaccatctaacagaatttattgtaacagtattattaatattgccaagttatccgatctaaaaaaaactatctatgcagtagatagtttttttgagccatattccacagataatattagacatatgataaaacgattagatggaccatctaataaatatcatatatataccgagaagttattatctgtagacgagcctagaaatcaacttattcttaataccctggtagaagaattcaagtcaggaactattaatcgcattttagttattactaaactacgtgaacatatggtattcttctacaaacgattattagattttttcggatcagaggttgtatttataggagacgcccaaaatagacgtactccagatatggtcaaatcaatcaaggaactaaatagatttatattcgtatccaccttattttattccggtactggtttagatattcctagtttggattctttgttcatttgctcggcagtaatcaacaatatgcaaatagagcaattactagggagggtatgtcgagaaacagaactattagataggacggtatatgtatttcctagcacatccatcaaagaaataaagtacatgataggaaatttcgttcaacgaattattagtctgtctgtagataaactaggatttaaacaaaaaagttatcggaaacatcaagaatccgatcccacttctgtatgtacaacatcctccagagaagaacgtgtattaaatagaatatttaactcgcaaaatcgttaagaagtttaagcgacgatccgcatgctgcgcaggccagtgtattacccctcatagtattaatataatccaatgatacttttgtgatgtcggaaatcttaaccaatttagactgacaggcagaacacgtcatgcaatcatcatcgtcatcgataactgtagtcttgggcttctttttgcggctcttcattccggaacgcacattggtgctatccatttaggtagtaaaaaataagtcagaatatgccctatagcacgatcgtgcaaaacctggtatatcgtctctatctttatcacaatatagtgtatcgacatctttattattattgacctcgtttatcttggaacatggaatgggaacatttttgttatcaacggccacctttgccttaattccagatgttgtaaaattataactaaacagtctatcatcgacacaaatgaaattcttgtttagacgtttgtagtttacgtatgcggctcgttcgcgtctcattttttcagatattgcaggtactataatattaaaaataagaatgaaataacataggattaaaaataaagttatcatgacttctagcgctgatttaactaacttaaaagaattacttagtctgtacaaaagtttgaaattttcagattctgcggctatagaaaagtataattctttggtagaatggggaacatctacttactggaaaataggcgtgcaaaaggtagctaatgtcgagacgtcaatatctgattattatgatgaggtaaaaaataaaccgtttaatattgatccgggctattacattttcttaccggtatattttgggagcgtctttatttattcgaagggtaaaaatatggtagaacttggatctggaaactcttttcaaataccagatgatatgcgaagtgcgtgtaacaaagtattagacagcgataacggaatagactttctgagatttgttttgttaaacaatagatggataatggaagatgctatatcaaaatatcagtctccagttaatatatttaaactagctagtgagtacggattaaacatacccaaatatttagaaattgaaatagaggaagacacattatttgacgacgagttatactctattatagaacgctctttcgatgataaatttccaaaaatatccatatcgtatattaagttgggagaacttaggcggcaagttgtagactttttcaaattctcattcatgtatattgagtccatcaaggtagatcgtataggagataatatttttattcctagcgttataacaaaatcaggaaaaaagatattagtaaaagatgtagaccatttaatacgatccaaggttagagaacatacatttgtaaaagtaaaaaagaaaaacacattttccattttatacgactatgatggaaacggaacagaaactagaggagaagtaataaaacgaattatagacactataggacgagactattatgttaacggaaagtatttctctaaggttggtagtgcaggcttaaagcaattgactaataaattagatattaatgagtgcgcaactgtcgatgagttagttgatgagattaataaatccggaactgtaaaacgaaaaataaaaaaccaatcagcatttgatttaagcagagaatgtttgggatatccagaagcggattttataacgttagttaataacatgcggttcaaaatagaaaattgtaaggttgtaaatttcaatattgaaaatactaattgtttaaataacccgagtattgagactatatatggaaactttaaccagttcgtctcaatctttaatatcgtcaccgatgtcaaaaaaagattattcgagtgaaataatatgcgcctttgatataggtgcaaaaaatcctgccagaactgttttagaagtcaaggataactccgttagggtattggatatatcaaaattagactggagttctgattgggaaaggcacatagctaaagatttgtcacaatatgaatacactacagttcttctagaacgtcagcctagaaggtcgccgtacgtcaaatttatctattttattaaaggctttttatatcatacatcggctgccaaagttatttgcgtctcgcctgtcatgtctggtaattcatatagagatcgaaaaaagagatcggtcgaagcatttcttgattggatggacacattcggattgcgagactccgttccggatagacgcaaattagacgatgtagcggatagtttcaatttggctatgagatacgtattagataaatggaatactaattatacaccttataataggtgtaaatctagaaattacataaaaaaaatgtaataacgttagtaacgccattatggataatctatttacctttctacatgaaatagaagatagatatgccagaactatttttaactttcatctaataagttgcgatgaaataggagatatatatggtcttatgaaagaacgcatttcctcagaggatatgtttgataatatagtgtataataaagatatacatcatgccattaagaaactagtgtattgcgacatccaacttactaaacacattattaatcagaatacgtatccggtatttaacgattcttcacaagtgaaatgttgtcattatttcgatataaactcagataatagcaatattagctctcgtacagtagagatatttgagagggaaaagtcatctcttgtatcatatattaaaactaccaataagaagagaaaggtcaattatggggaaataaagaaaactgtacatggaggcactaatgcaaattacttttccggtaaaaagtctgatgagtatctgagcactacagtcaggtccaacattaatcaaccttggatcaaaaccatttctaagagaatgagagtagatatcattaatcactctatagtaacgcgtggaaaaagctctatattacaaactatagaaattatttttactaatagaacatgtgtgaaaatattcaaggattctactatgcacattattctatccaaggacaaggatgaaaaggggtgtatacacatgattgacaaattattctatgtctattataatttatttctgttgttcgaggatatcatccaaaacgagtactttaaagaagtagctaatgttgtaaaccacgtactcacggctacggcattagatgagaaattattcctaattaagaaaatggctgaacacgatgtttatggagttagcaatttcaaaatagggatgtttaacctgacatttattaagtcgttggatcataccgttttcccctctctgttagatgaggatagcaaaataaagttttttaaggggaaaaagctcaatattgtagcattacgatctctggaggattgtataaattacgtgactaaatccgagaatatgatagaaatgatgaaggaaagatcgactattttaaatagcatagatatagaaacggaatcggtagatcgtctaaaagaattgcttctaaaatgaaaaaaaaacactaattcagaaatggatcaacgactcggatataagtttttggtgcctgatcctaaagccggagttttttatagaccgttacatttccaatatgtatcgtattctaattttatattgcatcgattgcatgaaatcttgaccgtcaagcggccactcttatcgtttaagaataatacagaacgaattatgatagaaattagcaatgttaaagtgactcctccagattactcacctataatcgcgagtattaaaggtaagagttatgacgcattagccacgttcactgtaaatatctttaaagaggtaatgaccaaagagggtatatccatcactaaaataagtagttatgagggaaaagattctcatttgataaaaattccgctactaataggatacgggaataaaaatccacttgatacagccaagtatcttgttcctaatgtcataggtggagtctttatcaataaacaatctgtcgaaaaagtaggaattaatctagtagaaaagattacaacatggccaaaatttagggttgttaagccaaactcattcactttctcgttttcctccgtatcccctcctaatgtattaccgacaagatatcgccattacaagatatctctggatatatcacaattggaagcgttgaatatatcatcgacaaagacatttataacggtcaatattgttttgctgtctcaatatttatctagagtgagtctagaattcattagacgtagtttatcatacgatatgcctccagaagttgtctatctagtaaacgcgataatagatagtgctaaacgaattactgaatctattactgactttaatattgatacatacattaatgacctggtggaagctgaacacattaaacaaaaatctcagttaacgatcaacgagttcaaatatgaaatgctgcataactttttacctcatatgaactatacacccgatcaactaaagggattttatatgatatctttactaagaaagtttctctactgtatctaccacacttctagatatccagatagagattcgatggtttgtcatcgcatcctaacgtacggcaaatattttgagacgttggcacatgatgaattagagaattacataggcaacatccgaaacgatatcatgaacaatcacaagaacagaggcacttacgcggtaaacattcatgtactaacaactcctggacttaatcatgcattttctagtctattgagtggaaagttcaaaaagtcagacggtagttatcgaacacatcctcactattcatggatgcagaatatttctattcctaggagtgttggattttatccggatcaagtaaagatttcaaagatgttttctgtcagaaaataccatccaagtcaatatctttacttttgttcatcggacgttccggaaagaggtcctcaggtaggtttagtatctcaattgtctgtcttgagttccattacaaatatactaacgtctgagtatttggatttggaaaagaaaatttgtgagtatatcagatcatattataaagatgatataagttactttgaaacaggatttccaatcactatagaaaatgctctagtcgcatctcttaatccaaatatgatatgtgattttgtaactgactttagacgtagaaaacggatgggattcttcggtaacttggaggtaggtattactttagttagggatcacatgaatgaaattcgcattaatattggagcgggaagattagtcagaccattcttggttgtggataacggagagctcatgatggatgtgtgtccggagttagaaagcagattagacgacatgacattctctgacattcagaaagagtttccgcatgtcatcgaaatggtagatatagaacaatttacttttagtaacgtatgtgaatcggttcaaaaatttagaatgatgtcaaaggatgaaagaaagcaatacgatttatgtgactttcctgccgaatttagagatggatatgtagcatcttcactagtgggaatcaatcacaattctggacccagagctattcttggatgtgctcaagctaaacaagctatctcttgtctgagctcggatatacgaaataaaatagacaatggaattcatttgatgtatccagagaggccaatcgtgattagtaaggctttagaaacttcaaagattgcggctaattgcttcggccaacatgttactatagcattaatgtcgtacaaaggtatcaatcaagaggatggaattatcatcaaaaaacaatttattcagagaggcggtctcgatattgttacagccaagaaacatcaagtagaaattccgttggaaaactttaataacaaagaaagagataggtctaacgcctattcaaaattagaaagtaatggattagttagactgaatgctttcttggaatccggagacgctatagcacgaaatatctcatcaagaactcttgaagatgattttgctagagataatcagattagctttgatgtttccgaaaaatataccgatatgtacaaatctcgcgttgaacgagtacaagtagaacttactgacaaagttaaggtacgagtattaaccatgaaagaaagaagacccattctaggagacaaatttaccactagaacgagtcaaaagggaacagtcgcgtatatcgcggatgaaacggaacttccatacgatgaaaatggtatcacaccagatgtcattattaattctacatccatcttctctagaaaaactatatctatgttgatagaggttattttaacagccgcatattctgctaagccgtacaacaataagggagaaaaccgacctgtctgttttcctagtagtaacgaaacatccatcgatacatatatgcaattcgctaaacaatgttatgagcattcaaatccgaaattgtctgatgaagaattatcggataaaatcttttgtgaaaagattctctatgatcctgaaacggataagccttatgcatccaaagtattttttggaccaatttattacttgcgtctgaggcatttaactcaggacaaggcaaccgttagatgtagaggtaaaaagacgaagctcattagacaggcgaatgagggacgaaaacgtggaggaggtatcaagttcggagaaatggagagagactgtttaatagcgcatggtgcagccaatactattacagaagttttgaaagattcggaagaagattatcaagatgtgtatgtttgtgaaaattgtggagacatagcagcacaaatcaagggtattaatacatgtcttagatgttcaaaacttaatctctctcctctcttaacaaaaattgataccacgcacgtatctaaagtatttcttactcaaatgaacgccagaggcgtaaaagttaaattagatttcgaacgaaggcctccttcgttttataaaccattagataaagttgatctcaaaccgtcttttctggtgtaatattctagtttggtagtagatacatatcaatatcatcaaattcgagatccgaattataaaatgggcgtggattgttaactatagaatcggacgtctgatattcgaaaatctgtggagttttaggttttggtggaggtgtaactgctacttgggatactgaagtctgatattcagaaagctgggggatgttctggttcgacatccaccgatggtgtcacatcactaatcggttcggtaacgtctgtggacgatggaggcaccacttctacaggttctggttctttatcctcagtcatcaacggagctacttcaatgcgaggaaatgtataatttggtaatggtttctcatgtggatctgaagaagaggtaagatatctactagaaagataccgatcacgttctagttctcttttgtagaacttaactttttctttctccgcatctagttgatattccaacctcttcacgttcgcatgggttacctccgcagtttttacgagcgatttcacgttcagccttcatgcgtcttatagcatgaattcgcttatcgttatcgggtttagcttctgtcaccttagcaattccttttttattaaactctacataatcatatccatttctattgtttgttctaatataaacgagtatagcatcattgctaaatttttcaatagtatcgaaaacagaatatcctaaaccatataatatatattcaggaacactcaaactaaatgtccaggattctcctaaatacgtaaactttaatagtgcgaaatcattcaaaaatctaccacttatagatagatagatagtacataaatgcgtatagtagtctacctatctctttattatgaaaaccggcattacgatcatatatgtcgtgatatacctgtgatccgtttacgttaaaccataaatacatgggtgatcctataaacatgaatttatttctaattctcagagctatagttaattgaccgtgtaatatttgcttacatgcatacttgatacgatcattaataagatttttatcattgctcgttatttcagaatcgtatatataaggagtaccatcgtgattcttaccagatattatacaaaatactatatataaaatatattgacccacgttagtaatcatgtaaatgtttaacgttttaaattttgtattcaatgatccattatcatacgctagcatggtcttatgatattcattctttaaaatataatattgtgttagccattgcattggggctcctaatggagattttttattctcatccattttaggataggctttcataaagtccctaataacttcgtgaataatgtttctatgttttctactgatgcatgtatttgcttcgatttttttatcccatgtttcatctatcatagatttaaacgcagtaatgctcgcaacattaacatcttgaaccgttggtacaattccgttccataaatttataatgttcgccatttatataactcattttttgaatatacttttaattaacaaaagagttaagttactcatatggacgccgtccagtctgaacatcaatctttttagccagagatatcatagccgctcttagagtttcagcgtgattttccaacctaaatagaacttcatcgttgcgtttacaacacttttctatttgttcaaactttgttgttacattagtaatctttttttccaaattagttagccgttgtttgagagtttcctcattgtcgtcttcatcggctttaacaattgcttcgcgtttagcctctggctttttagcagccgttgtagaaaaaaattcagttgctggaattgcaagatcgtcatctccggggaaaagagttccgtccatttaaagtacagattttagaaactgacactctgcgttatttatatttggtacaacacatggattataaatattgatgttaataacatcagaaaatgtaaagtctatacattgttgcatcgtgttaaattttctaatggatctagtattattgggtccaacttctgcctgaaatccaaatatggaagcggatacaaaaccgtttcctggataaaccacacatctccacttttgctttacatcagaaattgtgtcgttgacatcttgaactctcctatctaatgccggtgttccacctatagattttgaatattcgaatgctgcatgagtagcattaaattccttaatattgccataattttcatatattgagtaaccctggataaaaagtaaacacaccgcagccgtagctaccacaataaaaaaaattgatagagagttcatttataatctattagaagctgacaaaatttttttacacgcatcagacaatgctttaataaatagttcaacatctacttttgtcatatcgaaccgatggtatgattctaacctagaattacatccgaaaaagttgactatgttcatagtcattaagtcattaacaaacaacattccagactctggattataagacgatactgtttcgtcacaattacctaccttaatcatgtgattatgaatattggctattagagcaccttctaagaaatctataatatctttgaaacacgatttaaaatcaaaccacgaatatacttctacgaagaaagttagtttacccataggagaaataactataaatggagatctaaatacaaaatccggatctatgatagttttaacattattatattctctattaaatacctccacatctaaaaatgttaattttgaaactatgtcttcgtttattaccgtacctgaactaaacgctataagctctattgtttgagaactctttaaacgatattcttgaaatacatgtaacaaagtttcctttaactcggtcggtttatctaccatagttacagaatttgtatccttatctataatataataatcaaaatcgtataaagttatataattatcgcgttcagattgggatcttttcaaatagactaaaaaccccatttctctagtaagtatcttatgtatatgtttgtaaaatatcttcatggtgggaatatgctctaccgcagttagccattcctcattgacagcggtagatgtattagacaaaactattccaatgtttaacaagggccattttacgagattattaaatccttgtttgataaatgtagccaatgagggttcgagttcaacgacgattgaattctcttcccgcggatgctgcatgatgaacgacgggatgttgttcgattgatttggaattctttttcgactttttgtttatattaaatattttaaaatttatagcggatagcaattcatgtaccacggataatgtagacgcgtattgcgcatcgatatctttattattagataaatttatcaataaatgtgagaagtttgcctcgttaaggtcttccatttaaatattatataaacatttgtgtttgtatcttattcgtcttttatggaatagttttttactagtaaagctgcaattacacactttgtccgtaaaacataaatataaacaccagcttttatcaatcgttccaaaaagtcgacggcggacatttttaacatggcatctattttaaatacacttaggtttttggaaaaaacatcattttataattgtaacgattcaataactaaagaaaagattaagattaaacataagggaatgtcatttgtattttataagccaaagcattctaccgttgttaaatacttgtctggaggaggtatatatcatgatgatttggttgtattggggaaggtaacaattaatgatctaaagatgatgctattttacatggatttatcatatcatggagtgacaagtagtggaacaatttacaaattgggatcgtctatcgatagactttctctaaataggactattgttacaaaagttaataattataattatgatacattttttgacgatgatgattgatcgctattgcacaattttgtttttttactttctaatatagcgtttagattctttttcatgtgcgaatattgatttactaaaatatctatgtttaacttttgttctataacgtccttatcggcggtatcggtacatatacgtaattcaccttcacaaaatacggagtcttcgataataatagccaatcgattattggatctagctgtctgtatcatattcaacatgtttaatatatcctttcgtttcccctttacaggcatcgatcgtagcatattttccgcgtctgagatggaaatgttaaaactacaaaaatgcgtaatgttagcccgtcctaatattggtacgtgtctataagtttggcatagtagaataatagacgtgtttaaatgccttccaaagtttaagaattctattagagtattgcattttgatagtttatcgcctacatcatcaaaaataagtaaaaagtgtgctgattttttatgattttgtgcgacagcaatacatttttctatgttacttttagttcgtatcagattatattctagagattcctgactactaacgaaattaatatgatttggccaaatgtatccatcataatctggattataaacgggtgtaaacaagaatacatgtttatattttttaactagtgtagaaaacagagatagtaaatagatagtttttccagatccagatcctcccgttaaaaccattctaaacggcatttttaataaattttctcttgaaaattgtttttcttggaaacaattcataattatatttacagttactaaattaatttgataataaatcaaaatatggaaaactaaggtcgttagtagggaggagaacaaagaaggcacatcgtgacataaataacatttattatcatgatgacaccagaaaacgacgaagagcagacatctgtgttctccgctactgtttacagagacaaaattcagggaaagaataaacgcaaacgcgtgattggtctatgtattagaatatctatggttatttcactactatctatgattaccatgtccgcgtttctcatagtgcgcctaaatcaatgcatgtctgctaacgaggctgctattactgacgccgctgttgccgttgctgctgcatcatctactcatagaaaggttgcgtctagcactacgcaatatgatcacaaagaaagctgtaatggtttatattaccagggttcttgttatatattacattcagactaccagttattctcggatgctaaagcaaattgcactgcggaatcatcaacactacccaataaatccgatgtcttgactacctggctcattgattatgttaaggatacatggggatctgatggtaatccaattacaaaaactacatccgattatcaagattctgatgtatcacaagaagttagaaagtatttttgtgttaaaacaatgaactaatatttatttttgtacattaataaatgaaatcgcttaatagacaaactgtaagtaggtttaagaagttgtcggtgccggtcgctataatgatgatactctcaaccattattagtggcataggaacatttctgcattacaaagaagaactgatgcctagtgcttgcgccaatggatggatacaatacgataaacattgttatttagatactaacattaaaatgtctacagataatgcggtttatcagtgtcgtaaattacgagccagattgcctagaccggatactagacatctgagagtattgtttagtattttttataaagattattgggtaagtttaaaaaagaccaatgataaatggttagatattaataatgataaagatatagatattagtaaattaacaaattttaaacaactaaacagtacgacggatgctgaagcgtgttatatatacaagtctggaaaactggttaaaacagtatgtaaaagtactcaatctgtactatgtgttaaaaaattctacaagtgacaacaaaaaatgaattaataataagtcgttaacgtacgccgccatggacgccgcgtttgttattactccaatgggtgtgttgactataacagatacattgtatgatgatctcgatatctcaatcatggactttataggaccatacattataggtaacataaaaactgtccaaatagatgtacgggatataaaatattccgacatgcaaaaatgctactttagctataagggtaaaatagttcctcaggattctaatgatttggctagattcaacatttatagcatttgtgccgcatacagatcaaaaaataccatcatcatagcatgcgactatgatatcatgttagatatagaagataaacatcagccattttatctattcccatctattgatgtttttaacgctacaatcatagaagcgtataacctgtatacagctggagattatcatctaatcatcaatccttcagataatctgaaaatgaaattgtcgtttaattcttcattctgcatatcagacggcaatggatggatcataattgatgggaaatgcaatagtaattttttatcataaaagttgtaaagtaaataataaaacaataaatattgaactagtagtacgtatattgagcaatcagaaatgatgctggtacctcttatcacggtgaccgtagttgcgggaacaatattagtatgttatatattatatatttgtaggaaaaagatacgtactgtctataatgacaataaaattatcatgacaaaattaaaaaagataaagagttctaattccagcaaatctagtaaatcaactgatagcgaatcagactgggaggatcactgtagtgctatggaacaaaacaatgacgtagataatatttctaggaatgagatattggacgatgatagcttcgctggtagtttaatatgggataacgaatccaatgttatggcgcctagcacagaacacatttacgatagtgttgctggaagcacgctgctaataaataatgatcgtaatgaacagactatttatcagaacactacagtagtacttaatgaagataccaaacagaatcctaactattcatccaatcctttcgtaaattataataaaaccagtatttgtagcaagtcaaatccgttcattacagaactcaacaataaatttagtgagaataatccgtttagacgagcacatagcgatgattatcttaataagcaagaacaagatcatgaacacgatgatatagaatcattggtgtgattagtttcctttttataaaattgaagtaatatttagtattattgctgccgtcacgttgtacaaatggagatattccctgtattcggcatttctaaaattagcaattttattgctaataatgactgtagatattatatagatacagaacatcaaaaaattatatctgatgagatcaatagacagatggatgaaacggtacttcttaccaacatcttaagcgtagaagttgtaaatgacaatgagatgtaccatcttattcctcatagattatcgacgattatactctgtattagttctgtcggaggatgtgttatctctatagataatgacgtcaatggcaaaaatattctaacctttcccattgatcatgctgtaatcatatccccactgagtaaatgtgtcgtagttagcaagggtcctacaaccatattggttgttaaagcggatatacctagcaaacgattggtaacatcgtttacaaacgacatactgtatgtaaacaatctatcactgattaattattcgccgttgtctgtattcattattagacgagttaccgactatttggatagacacatatgcgatcagatatttgcgaataataagtggtattccattataaccatcgacaataagcagtttcctattccatcaaactgtataggtatgtcctctgccaagtacataaattctagcatcgagcaagatactttaatacatgtttgtaacctcgagcatccattcgacttagtatacaaaaaaatgcagtcgtacaattctgtacctatcaaggaacaaatattgtacggtagaattgataatataaatatgagcattagtatttctgtggattaatagatttctagtatggggatcattaatcatctctaatctctaaatacctcataaaacgaaaaaaaagctattatcaaatactgtacggaatggattcattctcttctctttttatgaaactctgttgtatatctactgataaaactggaagcaaaaaatctgataaaaagaataagaataagatcaaggattattataaaataacaatagttcctggttcctcttccacgtctactagctcgtggtattatacacatgcctagtaatagtctctttgcgttgacggaaagcagactagaaataacaggctaaaatgttcagacaccataatagttcccaacccagataataacagagtaccatcaacacattcctttaaactcaatcccaaacccaaaaccgttaaaatgtatccggccaattgatagtagataatgaggtgtacagcgcatgatgatttacacagtaaccaaaatgaaaatactttagtaattataagaaatatagatggtaacgtcatcatcaacaatccaataatatgccggagagtaaacattgacggataaaacaaaaatgctccgcataactctatcatggcaataacacaaccaaatacttgtaagattcctaaattagtagaaaatacaacggatatcgatgtataagtgatctcgagaaataataagaataaagtaatgcccgtaaagataaacatcaacattgtttggtaatcattaaaccaattagtatgaagttgaactaatttcacagtagattttattccagtattatccccgcatgtataagtacctggtaagatatctttatattccataatcaatgagacatcactatctgataacgaatgaagtctagcactagtatgccatttacttaatattgtcgtcttggaagttttattataagttaaaatatcatggttatccaatttccatctaatatactttgtcggattatctatagtacacggaataatgatggtatcattacatgctgtatactctatggtctttgtagttgttataacaaccaacgtatagaggtatatcaacgatattctaactcttgacattttttatttatttaaaatgatacctttgttatttattttattctattttgctaacggtattgaatggcataagtttgaaacgagtgaagaaataatttctacttacttattagacgacgtattatacacgggtgttaatggggcggtatacacattttcaaataataaactaaacaaaactggtttaactaataataattatataacaacatctataaaagtagaggatgcggaaccaataacggaaatcccaaatgttggaaaatagacggttcagacgacccaaaacatagaggtagaggatacgctccttatcaaaatagcaaagtaacgataatcagtcacaacggatgtgtactatctgacataaacatatcaaaagaaggaattaaacgatggagaagatttgacggaccatgtggttatgatttatacacggcggataacgtaattccaaaagatggtttacgaggagcattcgtcgataaagatggtacttatgacaaagtttacattcttttcactgatactatcggctcaaagagaattgtcaaaattccgtatatagcacaaatgtgcctaaacgacgaaggtggtccatcatcattgtctagtcatagatggtcgacgtttctcaaagtcgaattagaatgtgatatcgacggaagaagttatagacaaattattcattctagaactataaaaacagataatgatacgatactatatgtattcttcgatagtccttattccaagtccgcattatgtacctattctatgaataccattaaacaatctttttctacgtcaaaattggaaggatatacaaagcaattgccgtctccagctcctggtatatgtttaccagctggaaaagttgttccacataccacgtttgaagtcatagaaaaatataatgtactagatgatattataaagcctttatctaaccaacctatcttcgaaggaccgtctggtgttaaatggttcgatataaaggagaaggaaaatgaacatcgggaatatagaatatacttcataaaagaaaattctatatattcgttcgatacaaaatctaaacaaactcgtagctcgcaagtcgatgcgcgactattttcagtaatggtaacttcgaaaccgttatttatagcagatatagggataggagtaggaatgccacaaatgaaaaaaatacttaaaatgtaatcttaatcgagtacaccgcacgacaatgaacaaacataagacagattatgctggttatgcttgctgcgtaatatgcggtctaattgttggaattatttttacagcgacactattaaaagttgtagaacgtaaattagttcatacaccatcaatagataaaacgataaaagatgcatatattagagaagattgtcctactgactggataagctataataataaatgtatccatttatctactgatcgaaaaacctgggaggaaggacgtaatgcatgcaaagctctaaatccaaattcggatctaattaagatagagactccaaacgagttaagttttttaagaagcattagacgcggatattgggtaggagaatccgaaatattaaaccagacaaccccatataattttatagctaaaaatgccacgaagaatggaactaaaaaacggaaatatatttgtagtacaacgaatactcccaaactacatttttatcataccactacttcggttagatgttttagaaaaaaataaatatcgccgtaccgttcttgtttttataaaaataacaattaacaattatcaaattttttctttaatattttacgtggttgaccattcttggtggtaaaataatctcttagtgttggaatggaatgctgtttaatgtttccgcactcatcgtatattttgacgtatgcagtcacatcgtttacgcaatagtcagactgtagttctatcatgcttcctacatcagaaggaggaacagttttaaagtctcttggttttaatctattgccattagttttcatgaaatcctttgttttatccacttcacattttaaataaatgtccactatacattcttctgttaattttactagatcgtcatgggtcatagaatttataggttccgtagtccatggatccaaactagcaaacttcgcgtatacggtatcgcgattagtgtatacaccaactgtatgaaaattaagaaaacagtttaataaatcaacagaaatatttaatcctccgtttgatacagatgcgccatatttatggatttcggattcacacgttgtttgtctgaggtgttcgtctagtgttgcttctacgtaaacttcgattcccatatattctttattgtcagaatcgcataccgatttatcatcatacactgtttgaaaactaaatggtatacacatcaaaataataaataataacgagtacattctgcaatattgttatcgtaattggaaaaatagtgttcgagtgagttggattatgtgagtattggattgtatattttattttatattttatattttgtagtaagaatagaatgctaatgtcaagtttattccaatagatgtcttattaaaaaacatatataataaataacaatggctgaatggcataaaattatcgaggatatctcaaaaaataataagttcgaggatgccgccatcgttgattacaagactacaaagaatgttctagctgctattcctaacagaacatttgccaagattaatcctctcatcactaatcgtaatattctaaaacctcttattggtcagaaatattgtattgtatatactaactctctaatggatgagaacacgtatgctatggagttgcttactgggtacgcccctgtatctccgatcgttatagcgagaactcataccgcacttatatttttgatgggtaagccaacaacatccagacgtgacgtgtatagaacgtgtagagatcacgctacccgtgtacgtgcaactggtaattaaaataaaaagtaatattcatatgtagtgtcaattttaaatgatgatgatgaaatggataatatccatattgacgatgtcaataatgccggtattggcatacagttcatcgatttttagatttcattcagaggatgtggaattatgttatgggcatttgtattttgataggatctataatgtagtaaatataaaatataatccgcatattccatatagatataattttattaatcgcacgttaaccgtagatgaactagacgataatgtcttttttacacatggttattttttaaaacacaaatatggttcacttaatcctagtttgattgtctcattatcaggaaacttaaaatataatgatatacaatgctcagtaaatgtatcgtgtctcattaaaaatttggcaacgagtacatctactatattaacatctaaacataagacttattctctacatcggtccacgtgtattactataataggatacgattctattatatggtataaagatataaatgacatctatgattttactgcaatatgtatgctaatagcgtctacattgatagtgaccatatacgtgtttaaaaaaataaaaatgaactcttaattatgctatgctattagaaatggataaaatcaaaattacggttgattcaaaaattggtaatgttgttaccatatcgtataacttggaaaagataactattgatgtcacacctaaaaagaaaaaagaaaaggatgtattattagcgcaatcagttgctgtcgaagaggcaaaagatgtcaaggtagaagaaaaaaatattatcgatattgaagatgacgatgatatggatgtagaaagcgcataatacgatctataaaaataagtatataaatactttttatttactgtactcttactgtgtagtggtgataccctactcgattatttttttaaaaaaaaatacttattctgattcttctagccatttccgtgttcgttcgaatgccacatcgacgttaaagataggggagtagttgaaatctagttctgcattgttggtacgcacctcaaatgtagtgttggatatcttcaacgtatagttgttgagtagtgatggttttctaaatagaattctcttcatatcattcttgcacgcgtacatttttagcatccatcttggaatcctagatccttgttctattcccaatggtttcatcaatagaagattaaacatatcgtacgaacacgatggagagtaatcgtagcaaaagtaagcatttcctttaatctcagatcccggatactggatatattttgcagccaacacgtgcatccatgcagcatttcctacatatacccggctatgtaccgcgttatcatcgactgtacgatacataatgttaccgtgttgcttacattgctcgtaaaagactttcatcaatttgtctccttctccgtaaattccagtgggtcttaggcaacaagtatacaattttgctccattcatgattacggaattattggctttcataaccagttgctcggccatacgtttactttttgcgtatacatgtcctggtgatatatcataaagggtatgctcatggccgatgaatggatcaccgtgtttattgggtcctattgcttccatgctactagtatagatcaaatacttgattcctaggtccacacaagctgccaatatagtctgtgttccataatagtttactttcatgatttcattatcggtgtattttccaaatacatccactagagcagctgtatgaataatcagatttaccccatctagcgcttctcttaccttatcaaagtcgtttatatcacattgtatatagtttataaccttaactttcgaggttattggttgtggatcttctacaatatctatgactctgatttcttgaacatcatctgcactaattaacagttttactatatacctgcctagaaatccggcaccaccagtaaccgcgtacacggccattgctgccactcataatatcagactacttattctattttactaaataatggctgtttgtataatagaccacgataatatcagaggagttatttactttgaaccagtccatggaaaagataaagttattggattaaaatccggaacgtatagtttgataattcatcgttacggagatattagtcaaggatgtgattccataggcagtccagaaatatttatcggtaacatctttgtaaacagatatggtgtagcatatgtttatttagatacagatgtaaatatatctacaattattggaaaggcgttatctatttcaaaaaatgatcagagattagcgtgtggagttattggtatttcttacataaatgaaaagataatacattttcttacaattaacgagaatggcgtttgatatatcagttaatgcgtctaaaacaataaatgcattagtttacttttctactcagcaaaataaattagtcatacgtaatgaagttaatgatacacactacactgtcgaatttgatagggacaaagtagttgacacgtttatttcatataatagacataatgactccatagagataagaggggtgcttccagaggaaactaatattggttgcgcggttaatacgccggttagtatgacttacttgtataataagtatagttttaaactgattttagcagaatatataagacacagaaatactatatccggcaatatttattcggcattgatgacactagatgatttggctattaaacagtatggagacattgatctattatttaatgagaaacttaaagtagactccgattcgggactatttgactttgtcaactttgtaaaggatatgatatgttgtgattctagaatagtagtagctctatctagtctagtatctaaacattgggaattgacaaataaaaaatataggtgtatggcattagccgaacatatatctgatagtattccaatatctgagctatctagactacgatacaatctatgtaagtatctacgcgggcacactgagagcatagaggatgaatttgattattttgaagacgatgattcgtctacatgttctgccgtaaccgacagggaaacggatgtataattttttttatagcgtgaaggatatgataaaaaatataattgttgtatttatcccattccaatcaccttatatgattctgtaacacaatgaaggagtcttatagatgtatagaggtcagatactggtttgataaactgtttattccacataagtatgtttgactttatggttagacccgcatactttaacaaatcactgaaaattggagttaggtattgacctctcagaatcagttgccgttctggaacattaaatgtattttttatgatatactccaacgcatttatgtgggcatacaacaagtcattactaatggagtattccaagagaagagatttcaacagactgtttatgaactcgaatgccgcctcattgtcgcttatattgatgatgtcgaattctcccaatatcatcaccgatgagtagctcatcttgttatcgggatccaagttttctaaagatgtcattaaaccctcgatcatgaatggatttatcatcatcgtttttatgttggacatgagcttagtccgtttgtccacatctatagacgacgatttctgaattatttcatatatccctctctttaactccaggaacttgtcaggatggtctactttaatatgttctcgtctaagagatgaaaatctttggatggttgcacgcgacttttctctaaaggatcctctcttaaatgaatccatcttatccttggacaagatggacagtctattttccttagatggtttaatatttttgttacccatgatctataaaggtagacctaatcgtctcggatgaccatatatttattttcagttttattatacgcataaattgtaaaaaatatgttaggtttacaaaaatgtctcgtggggcattaatcgtttttgaaggattggacaaatctggaaaaacaacacaatgtatgaacatcatggaatctataccggcaaacacgataaaatatcttaactttcctcagagatccactgtcactggaaagatgatagatgactatctaactcgtaaaaaaacctataatgatcatatagttaatctattattttgtgcaaatagatgggagtttgcatcttttatacaagaacaactagaacagggaattactttaatagttgatagatacgcattctctggagtagcgtatgccgccgctaaaggcgcgtcaatgactctcagtaagagttatgaatctggattgcctaaacccgacttagttatattcttggaatctggtagcaaagaaattaatagaaacgtcggcgaggaaatttatgaagatgttacattccaacaaaaggtattacaagaatataaaaaaatgattgaagaaggagatattcattggcaaattatttcttctgaattcgaggaagatgtaaagaaggagttgattaagaatatagttatagaggctatacacacggttactggaccagtggggcaactgtggatgtaatagtgaaattacattttttataaatggatgaagcatattactctggcaacttggaatcagtactcggatacgtgtccgatatgcataccgaactcgcatcaatatctcaattagttattgccaagatagaaactatagataatgatatattaaacaaggacattgtaaattttatcatgtgtagatcaaacttggataatccatttatctctttcctagatactgtatatactattatagatcaagagatctatcagaccgaattgattaattcattagacgacaatgaaattatcgattgtatagttaacaagtttatgagcttttataaggataacctagaaaatatagtagatgctatcattactctaaaatatataatgaataatccagattttaaaactacgtatgccgaagtactcggttccagaatagcggatatagatattaaacaagtgatacgtgagaatatactacaattgtctaataatatccgcgaacgatatttgtgaaaatattaaaaaaaaatactttttttattaaatgacgtcgcttcgcgaatttagaaaattatgctgtgatatatatcacgcatcaggatataaagaaaaatctaaattaattagagactttataacagatagggatgataaatatttgatcattaagctattgcttcccggattagacgatagaatttataacatgaacgataaacaaattataaaattatatagtataatatttaaacaatctcaggaagatatgctacaagatttaggatacggatatataggagacactattaggactttcttcaaagagaacacagaaatccgtccacgagataaaagcattttaactttagaagaagtggatagttttttaactacgttatcatccgtaactaaagaatcgcatcaaataaaattattgactgatatcgcatccgtttgtacatgtaatgatttaaaatgtgtagtcatgcttattgataaagatctaaaaattaaagcgggccctcggtacgtacttaacgctattagtcctcatgcctatgatgtgtttagaaaatctaataacttgaaagagataatagaaaatgcatctaaacaaaatctagactctatatctatttctgttatgactccaattaatcccatgttagcggaatcgtgtgattctgtcaataaggcgtttaaaaaatttccatcaggaatgtttgcggaagtcaaatacgatggtgaaagagtacaagttcataaaaataataacgagtttgccttctttagtagaaacatgaaaccagtactctctcataaagtggattatctcaaagaatacataccgaaagcatttaaaaaagctacgtctatcgtattggattctgaaattgttcttgtagacgaacataatgtaccgctcccgtttggaagtttaggtatacacaaaaagaaagaatataaaaactctaacatgtgtttgttcgtgtttgactgtttgtactttgatggattcgatatgacggacattccattgtacgaacgaagatcttttctcaaagatgttatggttgaaatacccaatagaatagtattctcagagttgacgaatattagtaacgagtctcagttaactgacgtattggatgatgcactaacgagaaaattagaaggattggtcttaaaagatattaatggagtatacgaaccgggaaagagaagatggttaaaaataaagcgagactatttgaacgagggttccatggcagattctgccgatttagtagtactaggtgcttactatggtaaaggagcaaagggtggtatcatggcagtctttctaatgggttgttacgacgatgaatccggtaaatggaagacggttaccaagtgttcaggacacgatgataatacgttaagggagttgcaagaccaattaaagatgattaaaattaacaaggatcccaaaaaaattccagagtggttagtagttaataaaatctatattcccgattttgtagtagaggatccaaaacaatctcagatatgggaaatttcaggagcagagtttacatcttccaagtcccataccgcaaatggaatatccattagatttcctagatttactaggataagagaggataaaacgtggaaagaatctactcatctaaacgatttagtaaacttgactaaatcttaatagttacatacaaattaaaataacactatttagttggtggtcgccatggatggtgttattgtatactgtctaaacgcgttagtaaaacatggcgaggaaataaatcatataaaaaatgatttcatgattaaaccatgttgtgaaaaagtcaagaacgttcacattggcggacaatctaaaaacaatacagtgattgcagatttgccatatatggataatgcggtatccgatgtatgcaattcactgtataaaaagaatgtatcaagaatatccagatttgctaatttgataaagatagatgacgatgacaagactcctactggtgtatataattattttaaacctaaagatgccattcctgttattatatccataggaaaggatagagatgtttgtgaactattaatctcatctgataaagcgtgtgcgtgtatagagttaaattcatataaagtagccattcttcccatggatgtttccttttttaccaaaggaaatgcatcattgattattctcctgtttgatttctctatcgatgcggcacctctcttaagaagtgtaaccgataataatgttattatatctagacaccagcgtctacatgacgagcttccgagttccaattggttcaagttttacataagtataaagtccgactattgttctatattatatatggttgttgatggatctgtgatgcatgcaatagctgataatagaacttacgcaaatattagcaaaaatatattagacaatactacaattaacgatgagtgtagatgctgttattttgaaccacagattaggattcttgatagagatgagatgctcaatggatcatcgtgtgatatgaacagacattgtattatgatgaatttacctgatgtaggcgaatttggatctagtatgttggggaaatatgaacctgacatgattaagattgctctttcggtggctggtaaaaaattgaaaataaatacaaaggttcttgagggttgtgttaaattgaaagcgagaaataatcataaataagataaacgccgccaccatgtttgtctttcttgtcttattgccactagtctctagtcagtgtgttaatcttacaaccagaactcaattaccacctgcatacactaattctttcacacgtggtgtttattaccctgacaaagtattcagatcctcagtattacattcaactcaggacttgttcttacctttcttctccaatgttacttggttccatgctatacatgtctctgggaccaatggtactaagaggtttgataaccctgtcctaccatttaatgatggtgtttatttcgcttccactgagaagtctaacataataagaggctggatatttggtactactttagattcgaagacccagtccctacttattgttaataacgctactaatgttgttattaaagtctgtgaatttcaattctgtaatgatccattcttgggtgtttattaccacaagaacaacaagagttggatggaaagtgagttcagagtttattctagtgcgaataattgcactttcgaatatgtctctcagcctttccttatggaccttgaaggtaaacagggtaatttcaagaatcttagggaatttgtgtttaagaatattgatggttatttcaagatatattctaagcacacgcctattaatttagtgcgtgatctccctcagggtttctcggctttagaaccattggtagatttgccaataggtattaacatcactaggtttcaaactttacttgctttacatagaagttatttgactcctggtgattcttcttcaggttggacagctggtgctgcagcttattatgtgggttatcttcaacctaggactttcctattgaaatataatgagaatggaaccattacagatgctgtagactgtgcacttgaccctctctcagaaacaaagtgtacgttgaaatccttcactgtagagaaaggaatctatcaaacttctaactttagagtccaaccaacagaatctattgttagatttcctaatattacaaacttgtgccctttcggtgaagtatttaacgccaccagatttgcatctgtttatgcttggaacaggaagagaatcagcaactgtgttgctgattattctgtcctatataattccgcatcattctccacatttaagtgttatggagtgtctcctactaaattaaatgatctctgctttactaatgtctatgcagattcatttgtaattagaggtgatgaagtcagacaaatcgctccagggcaaactggaaagattgctgattataattataaattaccagatgactttacaggctgcgttatagcttggaattctaacaatcttgattctaaggttggtggtaattataattacctgtatagattgtttaggaagtctaatctcaaacctttcgagagagatatttcaactgaaatctatcaggccggtagcacaccttgtaatggtgttgaaggatttaattgttactttcctttacaatcatatggtttccaacccactaatggtgttggttaccaaccatacagagtagtagtactttcatttgaacttctacatgcaccagcaactgtttgtggacctaagaagtctactaatttggttaagaacaaatgtgtcaatttcaacttcaatggtttaacaggcacaggtgttcttactgagtctaacaagaagtttctgcctttccaacaatttggcagagacattgctgacactactgatgctgtccgtgatccacagacacttgagattcttgacattacaccatgttcatttggtggtgtcagtgttataacaccaggaacaaatacttctaaccaggttgctgttctttatcaggatgttaactgcacagaagtccctgttgctattcatgcagatcaacttactcctacttggcgtgtttattctacaggttctaatgtatttcaaacacgtgcaggctgtttaataggagctgaacatgtcaacaactcatatgagtgtgacatacccattggtgcaggtatatgcgctagttatcagactcagactaattctcctcggcgggcacgtagtgtagctagtcaatccatcattgcctacactatgtcacttggtgcagagaattcagttgcttactctaataactctattgccatacccacaaactttactattagtgttaccacagaaattctaccagtgtctatgaccaagacatcagtagattgtacaatgtacatttgtggtgattcaactgaatgcagcaatctattgttgcaatatggcagtttctgtacacaattaaaccgtgctttaactggaatagctgttgaacaagacaagaacacccaagaagtatttgcacaagtcaaacaaatttacaagacaccaccaattaaagatttcggtggatttaatttctcacaaatattaccagatccatctaaaccaagcaagaggtcatttattgaagatctactattcaacaaagtgacacttgcagatgctggcttcatcaaacaatatggtgattgccttggtgatattgctgctagagacctcatttgtgcacagaagtttaacggccttactgtattgccacctttgctcacagatgaaatgattgctcaatacacttctgcactgttagcgggtacaatcacttctggttggacctttggtgcaggtgctgcattacaaataccatttgctatgcaaatggcttataggtttaatggtattggagttacacagaatgttctctatgagaaccagaaattgattgccaaccaatttaatagtgctattggcaagattcaagactcactttcttccacagcaagtgcacttggtaaacttcaagatgtggtcaaccagaatgcacaagctttaaacacgcttgttaaacaacttagctccaactttggtgcaatttcaagtgtattaaatgatatcctttcacgtcttgacaaagttgaggctgaagtgcaaattgataggttgatcacaggcagacttcaaagtttgcagacatatgtgactcaacaattaattagagctgcagaaatcagagcttctgctaatcttgctgctactaagatgtcagagtgtgtacttggacaatctaagagagttgatttctgtggaaagggctatcatcttatgtccttccctcagtcagcacctcatggtgtagtcttcttgcatgtgacttatgtccctgcacaagagaagaacttcacaactgctcctgccatttgtcatgatggtaaagcacactttcctcgtgaaggtgtctttgtttcaaatggcacacactggtttgtaacacaaaggaatttctatgaaccacaaatcattactacagacaacacatttgtgtctggtaactgtgatgttgtaataggaattgtcaacaacacagtttatgatcctttgcaacctgaattagactcattcaaggaggagttagataaatatttcaagaatcatacatcaccagatgttgatttaggtgacatctctggcattaatgcttcagttgtaaacattcagaaagaaattgaccgcctcaatgaggttgccaagaatttaaatgaatctctcatcgatctccaagaacttggaaagtatgagcagtatatcaaatggccatggtacatttggctaggtttcatagctggcttgattgccatagtaatggtgacaattatgctttgctgtatgaccagttgctgtagttgtctcaagggctgttgttcttgtggatcctgctgcaaatttgatgaagacgactctgagccagtgctcaaaggagtcaaattacattacacataaggcgcgcctttttatactagtatttggaaagttttataggtagttgatagaacaaaatacataattttgtaaaaataaatcactttttatactaatatgacacgattaccaatacttttgttactaatatcattagtatacgctacaccttttcctcagacatctaaaaaaataggtgatgatgcaactttatcatgtaatcgaaataatacaaatgactacgttgttatgagtgcttggtataaggagcccaattccattattcttttagctgctaaaagcgacgtcttgtattttgataattataccaaggataaaatatcttacgactctccatacgatgatctagttacaactatcacaattaaatcattgactgctagagatgccggtacttatgtatgtgcattctttatgacatcgcctacaaatgacactgataaagtagattatgaagaatactccacagagttgattgtaaatacagatagtgaatcgactatagacataatactatctggatctacacattcaccggaaactagttctgagaaacctgattatatagataattctaattgctcgtcggtattcgaaatcgcgactccggaaccaattactgataatgtagaagatcatacagacaccgtcacatacactagtgatagcattaatacagtaagtgcatcatctggagaatccacaacagacgagactccggaaccaattactgataaagaagaagatcatacagttacagacactgtctcatacactacagtaagtacatcatctggaattgtcactactaaatcaaccaccgatgatgcggatctttatgatacgtacaatgataatgatacagtaccatcaactactgtaggcggtagtacaacctctattagcaattataaaaccaaggactttgtagaaatatttggtattaccgcattaattatattgtcggccgtggcaatattctgtattacatattatatatataataaacgttcacgtaaatacaaaacagagaacaaagtctagatttttgacttacataaatgtctgggatagtaaaatctatcatattgagcgggccatctggtttaggaaagacagccatagccaaaagactatgggaatatatttggatttgtggtgtcccataccactagatttcctcgtcctatggaacgagaaggtgtcgattaccattacgttaacagagaggccatctggaagggaatagccgccggaacatactgagtttttaggaaatatttacggaacttctaaaactgctgtgaatacagcggctattaataatcgtatttgtgtgatggatctaaacatcgacggtgttagaagttttaaaaatacttacctaatgccttactcggtgtatataagacctacctctcttaaaatggttgagaccaagcttcgttgtagaaacactgaagcggatgatgagattcatcgtcgtgtgatgttggcaaaaactgacatggatgaggcaggtgaagccggtctattcgacactattatcattgaagatgatgtgaatttagcatatagtaagttaattcagatactacaggaccgtattagaatgtattttaacactaattagagacttaagacttaaaacttgataattaataatataactcgtttttatatgtggctatttcaacgtctaatgtattagttaaatattaaaacttaccacgtaaaacttaaaatttaaaatgatatttcattgacagatagatcacacattatgaactttcaaggacttgtgttaactgacaattgcaaaaatcaatgggtcgttggaccattaataggaaaaggtggatttggtagtatttatactactaatgacaataattatgtagtaaaaatagagcccaaagctaacggatcattatttaccgaacaggcattttatactagagtacttaaaccatccgttatcgaagaatggaaaaaatctcacaatataaagcacgtaggtcttatcacgtgcaaggcatttggtctatacaaatccattaatgtggaatatcgattcttggtaattaatagattaggtgcagatctagatgcggtgatcagagccaataataatagattaccaaaaaggtcggtgatgttgatcggaatcgaaatcttaaataccatacaatttatgcacgagcaaggatattctcacggagatattaaagcgagtaatatagtcttggatcaaatagataagaataaattatatctagtggattacggattggtttctaaattcatgtctaatggcgaacatgttccatttataagaaatccaaataaaatggataacggtactctagaatttacacctatagattcgcataaaggatacgttgtatctagacgtggagatctagaaacacttggatattgtatgattagatggttgggaggtatcttgccatggactaagatatctgaaacaaagaattgtgcattagtaagtgccacaaaacagaaatatgttaacaatactgcgactttgttaatgaccagtttgcaatatgcacctagagaattgctgcaatatattaccatggtaaactctttgacatattttgaggaacccaattacgacaagtttcggcacatattaatgcagggtgtatattattaagtgtggtgtttggttgatgtaaaatttttgtcgataaaaattaaaaaataacttaatttattattgatctcgtgtgtacaaccgaaatcatggcgatgttttacgcacacgctctcggtgggtacgacgagaatcttcatgcctttcctggaatatcatcgactgttgccaatgatgtcagtttataataacaagtatgacattgtaaaagacaaatatatgtggtgttacagtcaggtgaacaagagatatattggagcactgctgcctatgtttgagtgcaatgaatatctacaaattggagatccgatccatgatcaagaaggaaatcacatatcgccacaaaaactactatgctctaagcggaatcgggtacgagagtctagacttgtgtttggaaggagtagggattcatcatcacgtacttgaaacagaaaacgctgtatatggaaaagttcaacatgattattctactatcaaagagaaggccaaagaaatgaatgcactcagttcaggacctatcatcgattaccacgtctggataggagattgtatctgtcaagttactgctgtggacgtacatggaaaggaaattatgagaatgagattcaaaaagggtgcggtgcttccgatcccaaatctggtaaaagttaaacttggggagaatgatacagaaaatctttcttctactatatcggcggcaccatcgaggtaaccacctctctggaagacagtgtgaatcatgtactcatgaaacgtttggaatctatacgccatatgtggtctgttgtatatgatcattttgatattgtgaatggtaaagaatgctgttatgtgcatacgcatttgtctaatcaaaatcttataccgagtactgtaaaaacaaatttgtacatgaagactatgggatcatgcattcaaatgagtatcttagcgaactgaaggaatcaggtggatggagtcccagaccagaaatgcaggaatttgaatatccagatggagtggaagacactgaatcaattgagagattggtagaggagttcttcaatagatcagaacttcaggctggtaaatctattaatgttaaacatacatctgtttcagctaagcaactaagaacacgtatactctcatcttttgccaacacagagggtggatatttgttcattggagttgataataatacacacaaagtatttggattcacggtgggttacgactacctcagactgatagagaatgatatagaaaagcatatcaaaagactttgtgttgtgtatttctgtgagaagaaagaggacatcaagtacacgtgtcgattcatcaaggtatataaacctggggatgaggctacctcgacatacgtgtgcgctatcaaagtggaaagatgctgttgtgctgtgtttgcagattggccagaatcatggtatcaagaagtattctccagatgaataggtgtcacatataaaattttaattaatgtaactatagagaacaaataataggttgtaatatcatatagacaataactaacaattaattagtaactgttatctctttttaactaactaactatacctattaatacatcgtaattatagttcttaacatctattaatcattgattcgcttctttaattttttataaaccaacattgttaattgaaaagggataacatgttacagaatataaattatatatggattttttttaaaaaggaaatacttgactggagtgtatatttatctcttcattatatagcacgcgtgttttccaatttttccacatcccatataatacaggattataatctcgttcgaacatacgagaaagtggataaaacaatagttgattttttatctaggttgccaaatttattccatattttagaatatggggaaaatattctacatatttattctatggatgatgctaatacgaatattataattttttttctagatagagtattaaatattaataagaacgggtcatttatacacaatctcaggttatcatcatccattaatataaaagaatatgtatatcaattagttaataatgatcatccagataataggataagactaatgcttgaaaatggacgtagaacaagacattttttgtcctatatatcagatacagttaatatctatatatgtattttatatagatgccgaagacagttacggttgtacattattacatagatgtatatatcactataagaaatcagaatcagaatcagaatcatacaatgaattaattaagatattgttaaataatggatcagatgtagataaaaaagatacgtacggaaacacaccttttatcctattatgtaaacacgatatcaacaacgtggaattgtttgagatatgtttagagaatgctaatatagactctgtagactttaatagatatacacctcttcattatgtctcatgtcgtaataaatatgattttgtaaagttattaatttctaaaggagcaaatgttaatgcgcgtaataaattcggaactactccattttattgtggaattatacacggtatctcgcttataaaactatatttggaatcagacacagagttagaaatagataatgaacatatagttcgtcatttaataatttttgatgctgttgaatctttagattatctattatccagaggagttattgatattaactatcgtactatttacgacgctgtcagttataatgcgtataatacgttggtctatctattaaacagaaatggtgattttgagacgattactactagtggatgtacatgtatttcggaagcagtcgcaaacaacaacaaaataataatggaagtactattgtctaaacgaccatctttgaaaattatgatacagtctatgatagcaattactaaacataaacagcataatgcagatttattgaaaatgtgtataaaatatactgcgtgtatgaccgattatgatactcttatagatgtacaatcactacagcaatataaatggtatattttaagatgtttcgatgaaatagatatcatgaagagatgttatataaaaaataaaactgtattccaattagttttttgtatcaaagacattaatactttaatgagatacggtaaacatccttctttcgtgaagtgcactagtctcgacgtatacggaagtcgtgtacgtaatatcatagcatctattagatatcgtcagagattaattagtctattatccaagaagctggatcctggagataaatggtcgtgttttcctaacgaaataaaatataacgataacgaactgtccacatatctaaaaatcttataaacactattaaaatataaaatcacactacatcattgtttccttttagtgctcgacagtgtatactatttttaacgctcataaataaaaatgaaaacgatttccgttgttacgttgttatgcgtactacctgctgttgtttattcaacatgtactgtacccactatgaataacgctaaattaacgtctaccgaaacatcgtttaataataaccagaaagttacgtttacatgtgatcagggatatcattcttcggatccaaatgctgtctgcgaaacagataaatggaaatacgaaaatccatgcaaaaaaatgtgcacagtttctgattacatctctgaactatataataaaccgctatacgaagtgaattccaccatgacactaagttgcaacggcgaaacaaaatattttcgttgcgaagaaaaaaatggaaatacttcttggaatgatactgttacgtgtcctaatgcggaatgtcaacctcttcaattagaacacggatcgtgtcaaccagttaaagaaaaatactcatttggggaatatataactatcaactgtgatgttggatatgaggttattggtgcttcgtacataagttgtacagctaattcttggaatgttattccatcatgtcaacaaaaatgtgatataccgtctctatctaatggattaatttccggatctacattttctatcggtggcgttatacatcttagttgtaaaagtggttttatactaacgggatctccatcatccacatgtatcgacggtaaatggaatcccatactcccaacatgtgtacgatctaacgaaaaatttgatccagtggatgatggtcccgacgatgagacagatttgagcaaactctcgaaagacgttgtacaatatgaacaagaaatagaatcgttagaagcaacttatcatataatcatagtggcgttaacaattatgggcgtcatatttttaatctccgttatagtattagtttgttcctgtgacaaaaataatgaccaatataagttccataaattgctaccgtgaatataaatccgttaaaataatgaataattaataattaataatttaataacaaacaagtatcaaaagattaaagacttatagctagaatcaattgagatgtcttcttcagtggatgttgatatctacgatgccgttagagcatttttactcaggcactattataacaagagatttattgtgtatggaagaagtaacgccatattacataatatatacaggctatttacaagatgcgccgttataccgttcgatgatatagtacgtactatgccaaatgaatcacgtgttaaacaatgggtgatggatacacttaatggtataatgatgaatgaacgcgatgtttctgtaagcgttggcaccggaatactattcatggaaatgtttttcgattacaataaaaatagtatcaacaatcaactaatgtatgatataattaatagcgtatctataattctagctaatgagagatatagaagcgcttttaacgacgatggtatatacatccgtagaaatatgattaacaagttgtacggatacgcatctctaactactattggcacgatcgctggaggtgtttgttattatctgttgatgcatctagttagtttgtataaataattatttcaatatactagttaaaattttaagattttaaatgtataaaaaactaataacgtttttatttgtaataggtgcattagcatcctattcgaataatgagtacactccgtttaataaactgagtgtaaaactctatatagatggagtagataatatagaaaattcatatactgatgataataatgaattggtgttaaattttaaagagtacacaatttctattattacagagtcatgcgacgtcggatttgattccatagatatagatgttataaacgactataaaattattgatatgtctactattcaacgcagaggtcacacgtgtagaatatctaccaaattatcatgccattatgataagtacccttatattcacaaatatgatggtgatgagcgacaatattctattactgcagagggaaaatgctataaaggaataaaatatgaaataagtatgatcaacgatgatactctattgagaaaacatactcttaaaattggatctacttatatatttgatcgtcatggacatagtaatacatattattcaaaatatgatttttaaaaatttaaaatatattatcacttcagtgacagtagtcaaataacaaacaacaccatgagatatattataattctcgcagttttgttcattaatagtatacacgctaaaataactagttataagtttgaatccgtcaattttgattccaaaattgaatggactggggatggtctatacaatatatcccttaaaaattatggcatcaagacgtggcaaacaatgtatacaaatgtaccagaaggaacatacgacatatccgcatttccaaagaatgatttcgtatctttctgggttaaatttgaacaaggcgattataaagtggaagagtattgtacgggaccaccgactgtaacattaactgaatacgacgaccatccgtatgctactagaggtagcaaaaagattcctatttacaaacgcggtgacatgtgtgatatctacttgttgtatacggctaacttcacattcggagattctaaagaaccagtaccatatgatatcgatgactacgattgcacgtctacaggttgcagcatagactttgtcacaacagaaaaagtgtgcgtgacagcacagggagccacagaagggtttctcgaaaaaattactccatggagttcgaaagtatgtctgacacctaaaaagagtgtatatacatgcgcaattagatccaaagaagatgttcccaatttcaaggacaaaatggccagagttatcaagagaaaatttaactaaatttctcggtagcacatcaaatgatgttaccacttttcttagcatgcttaacttgactaaatattcataactaatttttattaatgatacaaaaacgaaataaaactgcatattatacactggttaacgcccttataggctctaaccattttcaagatgaggtccctgattatagtccttctgttcccctctatcatctactccatgtctattagacgatgtgagaagactgaagaggaaacatggggattgaaaatagggttgtgtataattgccaaagatttctatcccgaaagaactgattgcagtgttcatctcccaactgcaagtgaaggcaatggattcagggatatacgaaacaccgataaattataaaaaaagcaatgtgtccgctgtttccgttaataatactattttcgtaactggcggattattcataaataactctaatagcacgatcgtggttaacaatatggaaaaacttgacatttataaagacaaacaatggtcgattatagaaatgcctatggctagggtatatcacggcatcgactcgacatttggaatgttatattttgccggaggtctatccgttaccgaacaatatggtaatttagagaaaaacaacgagatatcttgttacaatcctagaacgaataagtggtttgatatttcatatactatttataagatatccatatcatcattgtgtaaactaaataacgtcttctatgtatttagtaaggacattggatatgtggaaaagtatgatggtctccccgctataaaggcattatcaacttctccttattgattgaaaatgaaaatataaatagtttttatgtatagcagtattaccctatagttttattgcttactactaacatggatacagatacagatgttacaaatgtagaagatatcatgaatgaaatagatagagagaaagaagaaatactaaaaaatgtagaaattgaaaataataaaaacattaacaagaatcatcccaatgaatatattagagaagcactcgttattaatacaagtagtaatagtgattccattgataaagaagttatagaatgtatcagtcacgatgtaggaatatagatcatatctactaatttttataatcaatacaaaacataaaaaacaactcgttattacatagcaggcatggaatccttcaagtattgttttgataacgatggcaagaaatggattatcggaaatactttatattctggtaattcaatactctataaggtcagaaaaaatttcactagttcgttctacaattacgtaatgaagatagatcacaaatcacacaagccattgttgtctgaaatacgattctatatatctgtattggatcctttgactatcgacaactggacacgggaacgtggtataaagtatttggctattccagatctgtatggaattggagaaaccgatgattatatgttcttcgttataaagaatttgggaagagtattcgccccaaaggatactgaatcagtcttcgaagcatgcgtcactatgataaacacgttagagtttatacactctcgaggatttacccatggaaaaatagaaccgaggaatatactgattagaaataaacgtctttcactaattgactattctagaactaacaaactatacaagagtggaaactcacatatagattacaacgaggacatgataacttcaggaaatatcaattatatgtgtgtagacaatcatcttggagcaacagtttcaaaacgaggagatttagaaatgttgggatattgcatgatagaatggttcggtggcaaacttccatggaaaaacgaaagtagtataaaagtaataaaacaaaaaaaagaatataaaaaatttatagctactttctttgaggactgttttcctgaaggaaatgaacctctggaattagttagatatatagaattagtatacacgttagattattctcaaactcctaattatgacagactacgtagactgtttatacaagattgaaatattctttttttatagagtgtggtagtgttacggatatctaatattaatattagactatctctatcgcgctacacgaccaatatcgattactatggatatcttctatgaaaggagagaatgtattcatttctccagcgtcaatctcgtcagtattgacaatactgtattatggagctaatggatccactgctgaacagctatcaaaatatgtagaaaaggaggagaacacggataaggttagcgctcagaatatctcattcaaatccatgaataaagtatatgggcgatattctgccgtgtttaaagattcctttttgagaaaaattggcgataagtttcaaactgttgacttcactgattgtcgcactatagatgcaatcaacaagtgtgtagatatctttactgaggggaaaatcaatccactattggatgaacaattgtctcctagcaattagtgccgtatactttaaagcaaaatggttgacgccattcgaaaaggaatttaccagtgattatcccttttacgtatcaccaacggaaatggtagacgtaagtatgatgtctatgtacggcgagctatttaatcacgcatctgtaaaagaatcattcggtaacttttcaatcatagaactgccatatgttggagatactagtatgatggtcattcttccagacaagattgatggattagaatccatagaacaaaatctaacagatacaaattttaagaaatggtgtaactctctggaagctacgtttatcgatgttcacattcccaagtttaaggtaacaggctcgtataatctggtggatactctagtaaagtcaggactgacagaggtgttcggttcaactggagattatagcaatatgtgtaatttagatgtgagtgtcgacgctatgatccacaaaacgtatatagatgtcaatgaagagtatacagaagcagctgcagcaacttgtgcactggtgtcagactgtgcatcaacaattacaaatgagttctgtgtagatcatccgttcatctatgtgattaggcatgttgatggaaaaatttttttcgttggtagatattgctctccgacaactaattgttaaccattttttttaaaaaaatagaaaaaacatgtggtattagtgcaggtcgttattcttccaattgcaattggtaagatgacggccaactttagtacccacgtcttttcaccacagcactgtggatgtgacagactgaccagtattgatgacgtcaaacaatgtttgactgaatatatttattggtcgtcctatgcataccgcaacaggcaatgcgctggacaattgtattccacactcctctcttttagagatgatgcggaattagtgttcatcgacattcgcgagctggtaaaaaatatgccgtgggatgatgtcaaagattgtgtagaaatcatccgttgttatataccggatgagcaaaaaaccatcatcggactttgtgcatatgctgctacttactggggaggtgaagaccatcccactagtaacagtctgaacgcattgtttgtgatgcttgagatgctaaattacgtggattataacatcatattccggcgtatgaattgatgagttgtacatcttgacattttcttctttcttctcttctccctttcccagaaacaaactttttttacccactataaaataaaatgagtatactacctgttatatttctttctatatttttttattcttcattcgttcagacttttaacgcgcctgaatgtatcgacaaagggcaatattttgcatcattcatggagttagaaaacgagccagtaatcttaccatgtcctcaaataaatacgctatcatccggatataatatattagatattttatgggaaaaacgaggagcggataatgatagaattataccgatagataatggtagcaatatgctaattctgaacccgacacaatcagactctggtatttatatatgcattaccacgaacgaaacctactgtgacatgatgtcgttaaatttgacaatcgtgtctgtctcagaatcaaatatagatcttatctcgtatccacaaatagtaaatgagagatctactggcgaaatggtatgtcccaatattaatgcatttattgctagtaacgtaaacgcagatattatatggagcgggcatcgacgccttagaaataagagacttaaacaacggacacctggaattattaccatagaagatgttagaaaaaatgatgctggttattatacatgtgttttagaatatatatacggtggcaaaacatataacgtaaccagaattgtaaaattagaggtacgggataaaataataccttctactatgcaattaccagaaggtgttgtaacttcaataggtagtaatttgactattgcgtgtagagtatcgttgagacctcccacaacggatgcagacgtcttttggataagtaatggtatgtattacgaagaagatgatggggacggagacggtagaataagtgtagcaaataaaatctatatgaccgataagagacgtgttattacatcccggttaaacattaatcctgtcaaggaagaagatgctacaacgtttacgtgtatggcgtttactattcctagcatcagcaaaacagttactgttagtataacgtgaatgtatgttgttacatttccatgtcaattgagtttataagaatttttatacattatcttccaacaaacaattgacgaacgtattgctatgattaactcccacgatactatgcatattattaatcattaacttgcagactatacctagtgctattttgacatactcatgttcttgtgtaattgcggtatctatattattaaagtacgtaaatctagctatagttttattatttaattttagataatataccgtctccttatttttaaaaattgccacatcctttattaaatcatgaatgggaatttctatgtcatcgttaatatattgtgaacaacaagagcagatatctataggaaagggtggaatgcgatacattgatctatgtagttttaaaacacacgcgaactttgaagaatttatataaatcattccatcgatacatccttctatgttgacatgtatatatccaggaattcttttattaatgtcaggaaatgtataaactaaaacattgcccgaaagcggtgcctctatctgcgttatatccgttcttaacttacaaaatgtaaccaatacctttgcatgacttgttttgttcggcaacgttagtttaaacttgacgaatggattaattacaatagcatgatccgcgcatctattaagtttttttactttaacgcccttgtatgtttttacagagactttatctaaatttctagtgcttgtatgtgttataaatataacgggatatagaactgaatcacctaccttagatacccaattacattttatcagatccagataataaacaaattttgtcgccctaactaattctatattgttatatattttacaattggttatgatatcatgtaataacttggagtctaacgcgcatcgtcgtacgtttatacaattgtgatttagtgtagtatatctacacatgtatttttccgcactatagtattctggactagtgataaaactatcgttatatctgtcttcaatgaactcatcgagatattgctctctgtcatattcatacacctgcataaactttctagacatcttacaatccgtgttattttaggatcatatttacatatttacgggtatatcaaagatgttagattagttaatgggaatcgtctataataatgaatattaaacaattatatgaggacttttaccacaaagcatcataaaaatgagtcgtcgtctgatttatgttttaaatatcaaccgcgaatcaactcataaaatacaagagaatgaaatatatacatattttagtcattgcaatatagaccatacttctacagaacttgattttgtagttaaaaactatgatctaaacagacgacaacctgtaactgggtatactgcactacactgctatttgtataataattactttacaaacgatgtactgaagatattattaaatcatggagtggatgtaacgatgaaaaccagtagcggacgtatgcctgtttatatattgcttactagatgttgtaatatttcacatgatgtagtgatagatatgatagacaaagataaaaaccacttatcgcatagagactattccaacctactactagagtatataaaatctcgttacatgttattgaaggaagaggatatcgatgagaacatagtatccactttattagataagggaatcgatcctaactttaaacaagacggatatacagcgttacattattattatttgtgtctcgcacacgtttataaaccaggtgagtgtagaaaaccgataacgataaaaaaggccaagcgaattatttctttgtttatacaacatggagctaatctaaacgcgttagataattgtggtaatacaccattccatttgtatcttagtattgaaatgtgtaataatattcatatgactaaaatgctgttgacttttaatccgaatttcaaaatatgtaataatcatggattaacgcctatactatgttatataacttccgactacatacaacacgatattcttgttatgttaatacatcactatgaaacaaatgttggagaaatgccgatagatgagcgtcgtataatcgtattcgagtttatcaaaacatattctacacgtccggcagattcgataacttatttgatgaataggtttaaaaatatagatatttatacccgctatgaaggaaagacattattacacgtagcatgtgaatataataatacacacgtaatagattatcttatacgtatcaacggagatataaatgcgttaaccgacaataacaaacacgctacacaactcattatagataacaaagaaaattccccatataccattaattgtttactgtatatacttagatatattgtagataagaatgtgataagatcgttggtggatcaacttccatctctacctatcttcgatataaaatcatttgagaaattcatatcctactgtatacttttagatgacacattttacaatagacacgttaggaatcgcaattctaaaacgtatcgatacgcattttcaaaatacatgtcgtttgataaatacgatggtataataactaaatgtcataaagaaacaatattgctcaaactatccactgttctagacactacactatatgcagttttaagatgccataattcgaaaaagttaagaagatacctcaacgagttaaaaaaatataataacgataagtcctttaaaatatattctaatattatgaatgagagataccttaatgtatattataaagatatgtacgtgtcaaaggtatatgataaactatttcctgttttcacagataaaaattgtctactaacattactaccttcagaaattatatacgaaatattatacatgctgacaattaacgatctttataatatatcgtatccacctaccaaagtatagttgtatttttctcatgcgatgtgtgtaaaaaaactgatattatataaatattttagtgccgtataatgaagatgacgatgaaaatgatggtacatatatatttcgtatcattattgttattgctattccacagttacgccatagacatcgaaaatgaaatcacagaattcttcaataaaatgagagatactctaccagctaaagactctaaatggttgaatccagcatgtatgttcggaggcacaatgaatgatatagccgctctaggagagccattcagcgcaaagtgtcctcctattgaagacagtcttttatcgcacagatataaagactatgtggttaaatgggagaggctagaaaaaaatagacggcgacaggtttctaataaacgtgttaaacatggtgatttatggatagccaactatacatctaaattcagtaaccgtaggtatttgtgtaccgtaactacaaagaatggtgactgtgttcagggtatagttagatctcatattaaaaaacctccttcatgcattccaaaaacatatgaactaggtactcatgataagtatggcatagacttatactgtggaattctttacgcaaaacattataataatataacttggtataaagataataaggaaattaatatcgacgatattaagtattcacaaacgggaaagaaattaattattcataatccagagttagaagatagtggaagatacaactgttacgttcattacgacgacgttagaatcaagatgtaaaatacttacggttataccgtcgcaagaccacaggtttaaactaatactagatccaaaaatcaacgtaacgataggagaacctgccaatataacatgcactgctgtgtcaacgtcattattgattgacgatgtactgattgaatgggaaaatccatccggatggcttataggattcgattttgatgtatactctgttttaactagtagaggcggtatcaccgaggcgaccttgtactttgaaaatgttactgaagaatatataggtaatacatataaatgtcgtggacacaactattattttgaaaaaacccttacaactacagtagtattggagtaaatacacaatgcatttttatatacattactgaataattattattattatttatatcgtatttgtgctataacgcgactatctaggtatttgtatctcaccgatagagaacatataaatgtagactctattaaacagttgtgtaaaatatcagatcctaatagatgtggatgtacggctttagaaatgagttcattaaaatatgtgatatcaacggaacatatttatataattatactattgctgttagtataattattgattccacggaagaactaccaacagttactccaattacaacaacatataattatactatcgatgatagcactactgaagaactacaagtgactcctcatatggatctccatcgatgatacatgtattaaaatactttccgaataagtcttttaaatattgtattaattatgaaaaactatgctatgcgagtatgatacgatactagattttatctctagcgagagatgtcgttagaatcatttatcaacgaatatcgataacatgtgtcatttatacgttaaagtctgtccgtcttctctattgtttagactgtttgtagaatgctgtgatataaacaaactagtagacacaaatatttaactcatgatgaagttgagaatgatatgctttagctaatataaaaatatattaatccactatatattctagacttgatttaaaaccgataaactactactacgtactgtataagttaggagcagaccctaattatgtagatgatagaggtaatacttctgcatctatatgtccacttatgagaaaacgtcatttaataagatgcatcgtgaaaagaaatttattaaagagttggtaaaatatgaaaccgaaagtaaataatataggaaatacacctctacataactacgtatctcaatatgatatcactctcattcctcatccacaacccattaaaaaatggaaattaaagccctctattagcataaacggctacaggtctacctttacaatggcctttccttgtgcccagttcagaccctgtcattgccacgctactaaggactccctgaataccgtggccgacgtcagacattgtctgactgaatacatcctgtgggtttctcatagatggacccatagagaaagcgcagggtctctctacaggcttctcatctctttcagaactgatgcaacggagctctttggtggtgagttgaaggattcacttccgtggagatcattaaatgactccatgaaaaccgccgaagaacttcgtgcaatcattggactttgtactcaatcagctatcgtctctggaagagtcttcaacgataagtatatcgacatactacttatgctgcgaaagattctgaacgagaacgactatctcaccctcttggatcatatccgcactgctaaatactaaatctccttcatgctctctcactacactttttatcatcttatgaggaataattagcaccagaatagctatggattgcacatgtattctatgtcgtctactggatgaagatgtgacgtacaaaaaaataaaactagaaattgaaacgtgtcacaacttatcaaaacatatagatagacgaggaaacaatgcgctacattgttacgtctccaataaatgcgatacagacattaagattgttcgactgttactctctcgcggagtcgagagactttgtagaaacaacgaaggattaactccgctaggagcatacagtaagcatagatacgtaaaatctcagattgtgcatctactgatatccagctattcgaattcctctaacgaactcaagtcgaatataaatgatttcgacttacgtctgctaaaatacctaattgtggataaacggatacgtccgtccaagaatacgaattatgcaatcaatggtctcggattggtggatatatacgtaacgacgcctaatccgagaccagaagtattgctatggcttcttaaatcagaatgttacagcaccggttacgtatttcgtacctgtatgtacaacagtgatatgtgtaagaactctcttcattactatatatcgtctcatagagaatctctatccaaggatgtaattaaatgtttgatcgataacaatgtttccatccaatactactggtcttgctcaaccatagatatagagattattaataaaggatgtggacacgtgtagagtatacgacgtcagccctatattagaggcgtattatctaaacaagcgatttagagtaaccccatataatgtagacatggaaatcgttaatcttcttattgagagacgtcatactcttgtcgacgtaatgcgtagtattacttcgtacgattccagagaatataaccactacatcatcgataacattctaaagagatttagacaacaggatgaatccatcgtacaagccatactgataaactacttacattacggcgatatggtaagtatacctatcattcaatgcatgttggataagacgacggacaacaactttgttaataataatctcgtcgatgtaaacgtcgtaaggtttatcgtggaaaatatggacacgcggctgtaaatcacatatctaacaatggccgtctatgtatgtacggtctgatattatcgagatttaataattgcgggtatcactgttatgaagatgtatttgatatactaagcaagtacatggatgatatagatatgatcgataactctactatattacgcggtcgatgtcaataatatacaatttgcaaagcggttattggaatatggagcgagtgtcacgctcgataatcaatacggccatccagaaaagcagttaccaaagagaagctagttgatttattactgagttaccatcccactctagagactatgattgacgcatttaatagagatatacgctatctatatcctgaaccattattcgcctgtatcagatacgccttaatcctagatgatgattttccttctaaagtaagtatgatatcgccggtcgtcataaggaactaaagcgctatagagcagacattaatagaatgaagaatgcctacatatcaggcgtctccatgtttgatatattatttaaacgaagcaaacgccacagattgagatacgcaaagaacaatgagaggatcgactccattaaataatttatcatggagtgataatgtcctgtttccatggcatattacaaaatcgattccgtccaagatgataaaaacatttaccggcatcataaacacggagtttattttatatgtctcgcataaacattactaaaaaaatatattgttcggttttctttcacatctttaattatgaaaaagtaaatcattatgagatggacgcatcgttcgcgacagtatgtggtacatacctaacgtatttatggacgacggtaagaatgaaggtcacgtttctgtcaacaatgtcgacgcgatcgtgtaacacgactcacaatagaatctgtgaatgctctcccgatcatggatgcaaggcatgtgtttcccaaacaaaatgtggaataggatacggagtatccggagacgtcatctgttctccgtgtggtctcggaacatattctcacaccgtctcttccgcagataaatgcgaacccgtacccagaaatacctttaactatatcgatgtggaaattaacctgtatccagttaacgacacatcgtgtactcggacgaccactaccggtctcagcgaatccatctcaacgtcggaactaactattactatgaatcataaagactgcgatcccgtcttcttaataaggtagcgacttcaggtttctttacaggagaaaggtgtgcactctgaatttcgagattaaatgcaataacaaagattcttcctccaaacagttaacgaaagcaaagaatgatactatcatgccgcattcggagacagtaactctagcgtcgacatctatatactatatagtaataccaatactcaagactacgaaactgatacaatctcttatcatgtgggtaatgtagccatatgcccggtagttgcgatatacataaactgatcactaattccaaacccacccgctttttatagtaagtttttcacccataaatacaataattaatttctcgtaaaagtagaaaatatattctaatttattgcacggtaaggaagtagaatcataaagaacagtactcaatcaatagcaatcatgaaacaatatatcgtactggcatgcatgtgcctgccagtcttcagcaatcatcctcatcgtgtacggaagaagaaaacaaacatcatatgggaatcgatgttattatcaaagtcacaaagcaagaccaaacaccgaccgatgataagatttgccaatccgtaacggaaattacagagtccgagtcagatccagatcccgaggtggaatcagtcgaggatgtagatcctcctaccacttattactccatcatcggtggaggtctgagaatgaactttggattcaccaaatgtcctcagattaaatccatctcagaatccgctgatggaaagactgtgaggtgtctatcgacatcagatgtagcgaagaagagaaagacagcgacatcaagacccatccagtactcgggtctaacatctctcataagaaagtgagttacgaagatatcatcggttcaacgatcgtcgatacaaaatgtgtcaagaatctagagtttagcgttcgtatcggagacatgtgcaaggaatcatctgaacttgaggtcaagtatgtcgacggatcggcatctgaaggtgcaaccgatgatacttcactcatcgattcaacaaaactcaaagcgtgtgtctgaatcgataactctattcatctgaaattggatgagtagggttaatcgaacgattcaggcacaccacgaattaaaaaagtgtaccggacactatattccggtttgcaaaacaaaaagttacctctcgcgacttcttctttttctgtctcaatagtgtgatacgattatgacactattcctatttcctttcagggtatcacaaaaatattaaacctctttctgatggtctcatacaaaaatatttttattctctttctctctttgatggtctcataaaaaatatttttattctctttctctctttgatggtctcataaaatatttttattctctttctctctttgatggtctcataaaaaatatttttattctctttctctctttgatggtctcataaaatatttttattctctttctctctttgatggtctcataaaaaatatttttattctctttctctctttgatggtctcataaaa

SEQ ID NO: 2 - DNA, 171918 bp, Artificial Sequence
  sMVA-S/N
ttttatgagaccatcaaagagagaaagagaataaaaatattttttatgagaccatcaaagagagaaagagaataaaaatattttatgagaccatcaaagagagaaagagaataaaaatattttttatgagaccatcaaagagagaaagagaataaaaatattttatgagaccatcaaagagagaaagagaataaaaatattttttatgagaccatcaaagagagaaagagaataaaaatatttttgtatgagaccatcagaaagaggtttaatatttttgtgataccctgaaaggaaataggaatagtgtcataatcgtatcacactattgagacagaaaaagaagaagtcgcgagaggtaactttttgttttgcaaaccggaatatagtgtccggtacacttttttaattcgtggtgtgcctgaatcgttcgattaaccctactcatccaatttcagatgaatagagttatcgattcagacacacgctttgagttttgttgaatcgatgagtgaagtatcatcggttgcaccttcagatgccgatccgtcgacatacttgacctcaagttcagatgattccttgcacatgtctccgatacgaacgctaaactctagattcttgacacattttgtatcgacgatcgttgaaccgatgatatcttcgtaactcactttcttatgagagatgttagacccgagtactggatgggtcttgatgtcgctgtctttctcttcttcgctacatctgatgtcgatagacacctcacagtctttccatcagcggattctgagatggatttaatctgaggacatttggtgaatccaaagttcattctcagacctccaccgatgatggagtaataagtggtaggaggatctacatcctcgactgattccacctcgggatctggatctgactcggactctgtaatttccgttacggattggcaaatcttatcatcggtcggtgtttggtcttgctttgtgactttgataataacatcgattcccatatgatgtttgttttcttcttccgtacacgatgaggatgattgctgaagactggcaggcacatgcatgccagtacgatatattgtttcatgattgctattgattgagtactgttctttatgattctacttccttaccgtgcaataaattagaatatattttctacttttacgagaaattaattattgtatttatgggtgaaaaacttactataaaaagcgggtgggtttggaattagtgatcagtttatgtatatcgcaactaccgggcatatggctacattacccacatgataagagattgtatcagtttcgtagtcttgagtattggtattactatatagtatatagatgtcgacgctagagttactgtctccgaatgcggcatgatagtatcattctttgctttcgttaactgtttggaggaagaatctttgttattgcatttaatctcgaaattcagagtgcacacctttctcctgtaaagaaacctgaagtcgctaccttattaagaagacgggatcgcagtctttatgattcatagtaatagttagttccgacgttgagatggattcgctgagaccggtagtggtcgtccgagtacacgatgtgtcgttaactggatacaggttaatttccacatcgatatagttaaaggtatttctgggtacgggttcgcatttatctgcggaagagacggtgtgagaatatgttccgagaccacacggagaacagatgacgtctccggatactccgtatcctattccacattttgtttgggaaacacatgccttgcatccatgatcgggagagcattcacagattctattgtgagtcgtgttacacgatcgcgtcgacattgttgacagaaacgtgaccttcattcttaccgtcgtccataaatacgttaggtatgtaccacatactgtcgcgaacgatgcgtccatctcataatgatttactttttcataattaaagatgtgaaagaaaaccgaacaatatatttttttagtaatgtttatgcgagacatataaaataaactccgtgtttatgatgccggtaaatgtttttatcatcttggacggaatcgattttgtaatatgccatggaaacaggacattatcactccatgataaattatttaatggagtcgatcctctcattgttctttgcgtatctcaatctgtggcgtttgcttcgtttaaataatatatcaaacatggagacgcctgatatgtaggcattcttcattctattaatgtctgctctatagcgctttagttccttatgacgaccggcgatatcatacttactttagaaggaaaatcatcatctaggattaaggcgtatctgatacaggcgaataatggttcaggatatagatagcgtatatctctattaaatgcgtcaatcatagtctctagagtgggatggtaactcagtaataaatcaactagcttctctttggtaactgcttttctggatggccgtattgattatcgagcgtgacactcgctccatattccaataaccgctttgcaaattgtatattattgacatcgaccgcgtaatatagtagagttatcgatcatatctatatcatccatgtacttgcttagtatatcaaatacatcttcataacagtgatacccgcaattattaaatctcgataatatcagaccgtacatacatagacggccattgttagatatgtgatttacagccgcgtgtccatattttccacgataaaccttacgacgtttacatcgacgagattattattaacaaagttgttgtccgtcgtcttatccaacatgcattgaatgataggtatacttaccatatcgccgtaatgtaagtagtttatcagtatggcttgtacgatggattcatcctgttgtctaaatctctttagaatgttatcgatgatgtagtggttatattctctggaatcgtacgaagtaatactacgcattacgtcgacaagagtatgacgtctctcaataagaagattaacgatttccatgtctacattatatggggttactctaaatcgcttgtttagataatacgcctctaatatagggctgacgtcgtatactctacacgtgtccacatcctttattaataatctctatatctatggttgagcaagaccagtagtattggatggaaacattgttatcgatcaaacatttaattacatccttggatagagattctctatgagacgatatatagtaatgaagagagttcttacacatatcactgttgtacatacaggtacgaaatacgtaaccggtgctgtaacattctgatttaagaagccatagcaatacttctggtctcggattaggcgtcgttacgtatatatccaccaatccgagaccattgattgcataattcgtattcttggacggacgtatccgtttatccacaattaggtattttagcagacgtaagtcgaaatcatttatattcgacttgagttcgttagaggaattcgaatagctggatatcagtagatgcacaatctgagattttacgtatctatgcttactgtatgctcctagcggagttaatccttcgttgtttctacaaagtctctcgactccgcgagagagtaacagtcgaacaatcttaatgtctgtatcgcatttattggagacgtaacaatgtagcgcattgtttcctcgtctatctatatgttttgataagttgtgacacgtttcaatttctagttttatttttttgtacgtcacatcttcatccagtagacgacatagaatacatgtgcaatccatagctattctggtgctaattattcctcataagatgataaaaagtgtagtgagagagcatgaaggagatttagtatttagcagtgcggatatgatccaagagggtgagatagtcgttctcgttcagaatctttcgcagcataagtagtatgtcgatatacttatcgttgaagactcttccagagacgatagctgattgagtacaaagtccaatgattgcacgaagttcttcggcggttttcatggagtcatttctgatgaaacatttaatgatctaaatttcagtttatgtttgtaccccgtattcatacttaacaaattggtattacataccattaataatgcaagcataaaaaatcgttagtagatgtttctaaatataggttccgtaagcaaagaatataagaatgaagcggtaatgataaaatcaatcgttatctaaaatgatcatactcatttattttattctattatattaacacatacatttttaacagcaacacattcaatattgtattgttatttttatattatttacacaattaacaatatattattagtttatattactgaattaataatataaaattcccaatcttgtcataaacacacactgagaaacagcataaacacaaaatccatcaaaaatgttgataaattatctgatgttgttgttcgctgctatgataatcagatcattcgccgatagtggtaacgctatcgaaacgacatcgccagaaattacaaacgctacaacagatattccagctatcagattatgcggtccagagggagatggatattgtttacacggtgactgtatccacgctagagatatcgacggtatgtattgtagatgctctcatggttatacaggcattagatgtcagcatgtagtattagtagactatcaacgttcagaaaaaccaaacactacaacgtcatatatcccatctcccggtattatgcttgtattagtaggcattattattattacgtgttgtctattatctgtttataggttcactcgacgaactaaactacctatacaagatatggttgtgccataatttttataaattttttttatgagtatttttacaaaaatgtataaagtgtatgtcttatgtatatttataaaaatgctaaatatgcgatgtatctatgttatttgtatttatctaaacaatacctctacctctagatattatacaaaaattttttatttcggcatattaaagtaaaatctagttaccttgaaaatgaatacagtgggtggttccgtatcaccagtaagaacataatagtcgaatacagtatccgattgagattttgcatacaatactagtctagaaagaaatttgtaatcatcttctgtgacgggagtccatatatctgtatcatcgtcccatgctatattcctgttatcatcattagttaatgaaaataactctcgtgcttcagaaaagtcaaatattgtatccatacatacatctccaaaactatcgcttatacgtttatctttaacgatacctatacctagatggttatttactaacagacattttccagatctattgactataactcctatagtttccacatcaaccaagtaatgatcatctattgttatataacaataacataactcttttccgtttttatcagtatgtatatctatatcaacgtcgtcgttgtagtgaatagtagtcattgatctattatatgaaacggatatgtctagaacggcaattgttttacgtccagttaacactttcgttgatttaaagtctagagtctttgcaaacataatatccttatccgactttatatttcctgtagggtggtataattttattttgcctccacatatcggtgtttccaaatatattactagacaatattccatatagttattagttaagggtacccaattagaacacgtacgcttattatcatcatttggatcgtatttcataaaagttattgtactatcgatgtcaacacattctacattttttaatcgtctatatagtatttttctgatattttctataatatcagaattgtcttccatcggaagttgtatactatcggaatcagttacatgtttaaataattctctgatgtcattccttatacaatcaaattcattattaaacagtttaatagtctgtagacctttatcgtcgtaaatatccattgtcttattagttacgcttatttttatgtgtttttacgttgctttattatattttataagaatgattgtttgacgaatcacgagaactattaagacacattattaggtatatattataaaaaagtttttgattacgatgttataagaggaaagaggacacattaacatcatacatcaattaactacattcttataacatcgtaatcaaaagaattgcaattttgatgtataacaactgtcaatgggttatggaattgtatattacatattatacggtatgttggtaacgacaaataccgatcggtaattgtctgccggtgtaatagaattatatatatctatctattacaccggccttgtatacataataataagttgtggtagtatgatctccatatttataatttaggactttgtattcagtttttttggaatcataaaaaataaaaaaaagttttactaatttaaaattatttacatttttttcactgtttagtcgcggatatggaattcgatcctgccaaaatcaatacatcatctatagatcatgtaacaatattacaatacatagatgaaccaaatgatataagactaacagtatgcattatcacaaaaataaatccacatttggctaatcaatttcgggcttggaaaaaacgtatcgccggaagggactatatgactaacttatctagagatacaggaatacaacaatcaaaacttactgaaactgtcaaaaaaatagaaacatatatggtctatatatacactacaatttagttattaattggataaccgatgtgattatcaatcaatattaagaaggttggtaaattggtacatagctaataatacctatacacccaataatacaacaaccatttctgagttggatatcatcaaaatactggataaatacgaggacgtgtatagagtaagtaaagaaaaagaatgtgaaatttgctatgaagttgtttactcaaaacgatagatactttggtttattggattcgtgtaatcatatattttgcataacatgcatcaatatatggcatagaacacgaagagaaaccggtgcgtcggataattgtcctatatgtcgtacccgttttagaaacataacaatgagcaagttaactaataaataaaaagtttaatttgttgacgacgtatgtcgttattttttctcgtataaaagattaatttgattctaatataatctttagtattggataaatatcaattcaaattaattccattagattatatcataaataaaaatagtagcacgcactacttcagccaaatattcttttttgaaacgccatctatcgtagtgaggacacaagtgaacctataatgagcaaatttattagtatcggttacatgaaggactttacgtagagtggtgattccactatctgtggtacgaacggtttcatcttctttgatgccatcacccagatgttctataaacttggtatcctttgccaaccaatacatatagctaaactcaggcatatgttccacacatcctgaacaatgaaattctccagaagatgttacaatgtctagatttggacatttggtttcaaccgcgttaacatatgagtgaacacacccatacatgaaagcgatgagaaataggattttcatcttgccaaaatatcactagaaaaaatttatttatcaattttaaaggtataaaaaatacttattgttgctcgaatattttgtatttgatggtatacggaagattagaaatgtaggtattatcatcaactgattctatggttttatgtattctatcatgtttcactattgcgttggaaataatatcatatgcttccacatatattttattttgttttaactcataatactcacgtaattctggattattgacatatctatgaataattttagctccatgatcagtaaatattaatgagaacatagtattaccacctaccattatttttttcatctcattcaattcttaattgcaaagatctatataatcattatagcgttgacttatggactctggaatcttagacgatgtacagtcatctataatcatggcatatttaatacattgttttatagcatagtcgttatctacgatgttagatatttctctcaatgaatcaatcacacaatctaatgtaggtttatgacataatagcattttcagcagttcaatgtttttagattcgttgatggcaatggctatacatgtatatccgttatttgatctaatgttgacatctgaaccggattctagcagtaaagatactagagattgtttattatatctaacagccttgtgaagaagtgtttctcctcgtttgtcaatcatgttaatgtctttaagataaggtaggcaaatgtttatagtactaagaattgggcaagcataagacatgtcacaaagaccctttttgtatgtataagtgtaaaaattataacattcatagttggatttacataggtgtccaatcgggatctctccatcatcgagataattgatggcatctcccttccttttttagtagatatttcatcgtgtaagaatcaatattaatatttctaaagtatccgtgtatagcctctttatttaccacagttccatattccactagagggatatcgccgaatgtcatatactcaattagtatatgttggaggacatccgagttcattgttttcaatatcaaaaagatggtttccttatcatttctccatagtggtacaatactacacattattccgtgcggctttccattttccaaaaacaatttgaccaaatctacatctttattgtatctataatcactatttagataatcagccataattactcgagtgcaacatgttagatcgtctatatatgaataagccgtgttatctattcctttcattaacaatttaacgatgtctatatctatatgagatgacttaatataatattgaagagctgtacaatagtttttatctataaaagacggcttgattccgtgattaattagacatttaacaacttccggacgcacatatgctctcgtatccgactctgaatacagatgagagatgatatacagatgcaatacggtaccgcaatttcgtagttgataatcatcatacgcgtatcagtactcgtcctcataaagaacactgcagccattttctatgaacaaatcaataatttcaggaacaggatcatctgtcattacataattttctataactgaacgatggttttcacatttaacactcaagtcaaatccatgttctaccaacacctttatcaagtcaacgtctacatttttggatttcatatagctgaatatattaaagtcatttatgttgctaaatccagtggcttctagtagagccatcgctatatcctttaactttaacatgtctactatttgtgtattcttctaatggggtagctgtctccaatttttgcgtaatggattagtgccactgtctagtagtagtttgacgacctcgacattattacaatgctcattaaaaaggtatgcgtgtaaagcattattcttgaattggttcctggtatcattaggatctctgtctctcaacatctgtttaagttcatcgagagccacctcctcattttccaaatagtcaaacattttgactgaatgagctactgtgaactctatacacccacacaactaatgtcattaaatatcatgtcaaaaacttgtacaattattaataaaaataatttagtgtttaaattttaccagttccagattttacacctccgttaaccccactttttacaccactggacgatcctcctccccacattccaccgccaccagatgtataagttttagatcctttattactaccatcatgtccatggataaagacactccacatgccgccactaccccctttagaagacatattaataagacttaaggacaagtttaacaataaaattaatcacgagtaccctactaccaacctacactattatatgattatagtttctatttttacagtaccttaactaaagtctctagtcacaagagcaatactaccaacctacactattatatgattatagtttctatttttataggaacgcgtacgagaaaatcaaatgtctaatttctaacggtagtgttgataaacgattatcgtcaatggatacctcctctatcatgtcgtctattttcttactttgttctattaacttattagcattatatattatttgattataaaacttatattgcttattagcccaatctgtaaatatcggattattaacatatcgtttctttgtaggtttatttaacatgtacatcactgtaagcatgtccgtaccatttattttaatttgacgcatatccgcaatttctttttcgcagtcggttataaattctatatatgatggatacatgctacatgtgtacttataatcgactaatatgaagtacttgatacatattttcagtaacgatttattattaccacctatgaataagtacctgtgatcgtctaggtaatcaactgttttcttaatacattcgatggttggtaatttactcagaataatttccaatatcttaatatataattctgctatttctgggatatatttatctgccagtataacacaaatagtaatacatgtaaacccatattttgttattatattaatgtctgcgccattatctattaaccattctactaggctgacactatgcgacttaatacaatgataaagtatactacatccatgtttatatcatcaatatacggcttacaaagttttagtatcgataacacatccaactcacgcatagagaaggtagggaataatggcataatatttattaggttatcatcattgtcattatctacaactaagtttccattttttaaaatatactcgacaactttaggatctctattgccaaatttttgaaaatatttatttatatgcttaaatctatataatgtagctccttcatcaatcatacatttaataacattgatgtatactgtatgataagatacatattctaacaatagatcttgtatagaatctgtatatcttttaagaattgtggatattattacgtaaactattacacaattctaaaatataaaacgtatcacggtcgaataatagttgatcaactatataattatcgattttgtgatttttcttcctaaactgtttacgtaaatagttagatagaatattcattagttcatgaccactatagttactatcgaataacgcgtcaaatatttcccgtttaatatcgcatttgtcaagataataatagagtgtggtatgttcacgataagtataataacgcatctctttttcgtgtgaaattaaatagtttattacgtccaaagatgtagcataaccatcttgtgacctagtaataatataataatagagaactgttttacccattctatcatcataatcagtggtgtagtcgtaatcgtaattgtctaattcatcatcccaattataatattcaccagcacgtctaatctgttctattttgatcttgtatccatactgtatgttgctacatgtaggtattcctttatccaataatagtttaaacacatctacattgggatttgatgttgtagcgtatttttctacaatattaataccatttttgatactatttatttctatacctttcgaaattagtaatttcaataagtctatatcgatgttatcagaacatagatattcgagtatatcaaaatcattgatatttttatagtcgactgacgacaataacaaaatcacaacatcgtttttgatattattatttttcttggtaacgtatgcctttaatggagtttcaccatcatactcatataatggatttgcaccactttctatcaatgattgtgcactgctggcatcgatgttaaatgttttacaactatcatagagtatcttatcgttaaccatgattggttgttgatgctatcgcattttttggtttctttcatttcagttatgtatggatttagcacgtttgggaagcatgagctcatatgatttcagtactgtagtgtcagtactattagtttcaataagatcaatctctagatctatagaatcaaaacacgataggtcagaagataatgaatatctgtaggcttcttgttgtactgtaacttctcgttttgttagatgtttgcatcgtgctttaacatcaatggtacaaattttatcctcgctttgtgtatcatattcgtccctactataaaattgtatattcagattatcatgagatgtgtatacgctaacggtatcaataaacggagcacaccatttagtcataaccgtaatccaaaaatttttaaagtatatcttaacgaaagaagttgtgtcattgtctacggtgtatggtactagatcctcataagtgtatatatctagagtaatgtttaatttatcaaatggttgataatatggatcctcatgacaatttccgaagatggaaatgagatatagacatgcaataaatctaattgcggacatggttactccttaaaaaaatacgaataatcaccttggctatttagtaagtgtcatttaacactatactcatattaatccatggactcataatctctatacgggattaacggatgttctatatacggggatgagtagttttcttctttaactttatactttttactaatcatatttagactgatgtatgggtaatagtgtttaaagagttcgttctcatcatcagaataaatcaatatctctgtttttttgttatacagatgtattacagcctcatatattacgtaatagaacgtgtcatctaccttattaactttcaccgcatagttgtttgcaaatacggttaatcctttgacctcgtcgatttccgaccaatctgggcgtataatgaatctaaactttaatttcttgtaatcattcgaaataatttttagtttgcatccgtagttatcccctttatgtaactgtaaatttctcaacgcgatatctccattaataatgatgtcgaattcgtgctgtatacccatactgaatggatgaacgaataccgacggcgttaatagtaatttactttttcatctttacatattgggtactagttttactatcataagtttataaattccacaagctactatggaataagccaaccatcttagtataacacacatgtcttaaagtttattaattaattacatgttgttttatatatcgctacgaatttaaacagagaaatcagtttaggaaaaaaaaatatctatctacatcatcacgtctctgtattctacgatagagtgctactttaagatgagacatatccgtgtcatcaaaaatatactccattaaaatgattattccggcagcgaacttgatattggatatatcacaacctttgttaatatctacgacaatagacagcagtcccatggttccataaacagtgagtttatctttctttgaagagatattttgtagagatcttataaaactgtcgaatgacatcgcatttatatctttagctaaatcgtatatgttaccatcgtaatatctaaccgcgtctatcttaaacgtttccatcgctttaaagacgtttccgatagatggtctcatttcatcagtcatactgagccaacaaatataatcgtgtataacatctttgatagaatcagactctaaagaaaacgaatcggctttattatacgcattcatgataaacttaatgaaaaatgtttttcgttgtttaagttggatgaatagtatgtcttaataattgttattatttcattaattaatatttagtaacgagtacactctataaaaacgagaatgacataactagttatcaaagtgtctaggacgcgtaattttcatatggtatagatcctgtaagcattgtctgtattctggagctattttctctatatctaatttctgaacgttcaccaatgtctctagccactttggcactaatagcgatcattcgcttagcgtcttctatattattaactggttgattcaatctatctagcaatggaccgtcggacagcgtcattctcatgttcttaatcaatgtacatacatcgccgtcatctaccaattcatccaacaacataagctttttaaaatcatcattataataggtttgatcgttgtcatttctccaaagaatatatctaataagtagagtcctcatgattagttaacaactattttttatgttaaatcaattagtacaccgctatgtttaatacttattcatattttagtttttaggattgagaatcaatacaaaaattaatgcatcattaattttagaaatacttagtttccacgtagtcaatgaaacatttgaactcatcgtacaggacgttctcgtacaggacgtaactataaaccggtttatatttgttcaagatagatacaaatccgataactttttttacgaattctacgggatccactttaaaagtgtcataccgggttctttttatttttttaaacagattaatggtgtgatgttgattaggtcttttacgaatttgatatagaatagcgtttacatattctccataatggtcaatcgccatttgttcgtatgtcataaattctttaattatatgacactgtgtattatttagttcatccttgttcatcattaggaatctatccaatatggcaattatactagaactataggtgcgttgtatacacatattgatgtgtctgtttatacaatccatgctactaccttcgggtaaaattgtagcatcatataccatttctagtactttaggttcattgttatccattgcagaggacgtcatgaacgcatcctaaaaaaatatattatttttatgttattttgttaaaaataatcatcgaatacgaatcatccagtccactgaatagcaaaatctttactattttggtatcttccaatgtggctgcctgatgtaatggaaattcattctctagaagatttttcaatgctccagcgttcaacaacgtacatactagacgcacgttattatcagctattgcataatacaaggcactatgtccatggacatccgccttaaatgcatctttgctagagagaaagcttttcagctgcttagacttccaagtattaattcgtgacagatccatgtctgaaacgagacgctaattagtgtataatttttgtcatattgcaccagaattaataatatctctaatagatctgattagtagatacatggctatcgcaaaacaacatatacacatttaataaaaataatatttattaagaaaattcagatttcacgtacccatcaatataaataaaataatgattccttacaccgtacccatattaaggagattctaccttacccataaacaatataaatccagtaatatcatgtctgatgatgaacacaaatggtgtattaaattccagtttttcaggagatgatctcgccgtagctaccataatagtagatgcctctgctacagttccttgttcgtcgacatctatctttgcattctgaaacattttataaatatataatgggtccctagtcatatgtttaaacgacgcattatctggattaaacatactaggagccatcatttcggctatcgacttaatatccctcttattttcgatagaaaatttagggagtttaagattgtacactttattccctaattgaaacgaccaatagtctaattttgcagccgtaatagaatctgtgaaatgggtcatattatcacctattgccaggtacatactaatattagcatccttatacggaaggcgtaccatgtcatattctttgtcatcgattgtgattgtatttccttgcaatttagtaactacgttcatcatgggaaccgttttcgtaccgtacttattagtaaaactagcattgcgtgttttagtgatatcaaacggatattgccatatacctttaaaatatatagtattaatgattgcccatagagtattattgtcgagcatattagaatctactacattagacataccggatctacgttctactatagaattaattttattaaccgcatctcgtctaaagtttaatctatataggccgaatctatgatattgttgataatacgacggtttaatacacacagtattatctacgaaactttgataagttagatcagtgtacgtatatttagatgttttcagcttagctaatcctgatattaattctgtaaatgctggacccagatctctttttctcaaatccatagtcttcaataattctattctagtattacctgatgcaggcaatagcgacataaacatagaaaacgaataaccaaacggtgagaagacaatattatcatcttgaatatttttatacgctactataccggcattggtaaatccttgtagacgataggtagacgctgaacacgttaacgatagtatcaataacgcaatcatgattttatggtattaataattaaccttatttttatgttcggtataaaaattattgatgtctacacatccttttgtaattgacatctatatatccttttgtataatcaactctaatcactttaacttttacagttttccctaccagtttatccctatattcaacatatctatccatatgcatcttaacactctctgccaagatagcttcagagtgaggatagtcaaaaagataaatatatagagcataatcattctcgtatactctgccctttattacatcgcccgcattgggcaacgaataacaaaatgcaagcatcttgttaacgggctcgtaaattgggataaaaattatgtttttatatctattttattcaagagaatattcaggaatttctttttccggttgtatctcatcgcagtatatatcatttgtacattgtttcatattttttaatagtttacaccttttagtaggactagtatcgtacaattcatagctgtattttgaattccaatcacgcataaaaatatcttctaattgttgacgaagacctaatccatcatccggtgtaatattaatagatgctccacatgtatccgtaaagtaatttcctgtccaatttgaggtacctatataggccgttttatcggttaccatatatttggcatggtttaccctagaatacggaatgggaggatcagcatctggtacaataaatagctttacttctatatttatgtttttagattttagcatagcgatagatcttaaaaagtttctcatgataaacgaagatcgttgccagcaactaatcaatagcttaacggatacttgtctgtctatagcggatcttcttaattcatcttctatataaggccaaaacaaaattttacccgccttcgaataaataatagggataaagttcataacagatacataaacgaatttactcgcatttctaatacatgacaataaagcggttaaatcattggttctttccatagtacatagttgttgcggtgcagaagcaataaatacagagtgtggaacaccacttacgttaatactaagaggatgatctgtattataatacgacggataaaagtttttccaattatatggtagattgttaactccaagataccagtatacctcaaaaatttgagtgagatccgctgccaagttcctattattgaagatcgcaatacccaattctttgacctgagttagtgatctccaatccatgttagcgcttcctaaataaatatgtgtattatcagatatccaaaattttgtatgaagaactcctcctaggatatttgtaatatctatgtatcgtacttcaactccggccatttgtagtctttcaacatcctttaatggtttgttagatttattgacggctactctaactcgtactcctcttttgggtaattgtacaatctcgtttaatattatcgtgccgaaattcgtacccacttcatccgataaactccaataaaaagatgatatatctagtgtttttgtggtattggatagaatttccctccacatgttaaatgtagacaaatatactttatcaaattgcatacctataggaatagtctctgtaatcactgcgattgtattatccggattcattttatttgttaaaagaataatcctatatcacttcactctattaaaaatccaagtttctatttctttcatgactgattttttaacttcatccgtttccttatgaagatgatgtttggcaccttcataaatttttatttctctattacaatttgcatgttgcatgaaataatatgcacctaaaacatcgctaatctcattgtttgttccctggagtatgagagtcggggtgttaatcttggaaattatttttctaaccttgttggtagccttcaagacctgactagcaaatccagccttaattttttcatgattgattaatgggtcgtattggtatttataaactttatccatatctctagatactgattctggacatagctttccgactggcgcatttggtgtgatggttcccataagtttggcagctagcagattcagtcttgaaacagcatctgcattaactagaggagacattagaatcattgctgtaaacaagtttggattatcgtaagaggctagtatagaaattgttgctcccatggaatgacccaataagtagatttaatagttaccacgtgctgtaccaaagtcatcaatcatcattttttcaccattacttcttccatgtccaatatgatcatgtgagaatactaaaattcctaacgatgatatgttttcagctagttcgtcataacgtccagaatgtttaccagctccatgacttatgaatactaatgccttaggatatgtaatcattgtccagattgaacatacagtttgcactcatgattcacgttatataactatcaatattaacagttcgtttgatgatcatattatttttatgttttattgataattgtaaaaacatacaattaaatcaatatagaggaaggagacggctactgtcttttgtgagatagtcatggcgactaaattagattatgaggatgctgttttttactttgtggatgatgataaaatatgtagtcgcgactccatcatcgatctaatagatgaatatattacgtggagaaatcatgttatagtgtttaacaaagatattaccagttgtggaagactgtacaaggaattgatgaagttcgatgatgtcgctatacggtactatggtattgataaaattaatgagattgtcgaagctatgagcgaaggagaccactacatcaattttacaaaagtccatgatcaggaaagtttattcgctaccataggaatatgtgctaaaatcactgaacattggggatacaaaaagatttcagaatctagattccaatcattgggaaacattacagatctgatgaccgacgataatataaacatcttgatactttttctagaaaaaaaattgaattgatgatataggggtcttcataacgcataattattacgttagcattctatatccgtgttaaaaaaaattatcctatcatgtatttgagagttttatatgtagcaaacatgatagctgtgatgccaataagctttagatattcacgcgtgctagtgttagggatggtattatctggtggtgaaatgtccgttatataatctacaaaacaatcatcgcatatagtatgcgatagtagagtaaacatttttatagtttttactggattcatacatcgtctacccaattcggttatgaatgaaattgtcgccaatcttacacccaaccccttgttatccattagtatagtattaacttcgttatttatgtcataaactgtaaatgattttgtagatgccatatcatacatgatattcatgtccctattataatcattactaactttatcacaatatatgttgataatatctatatatgatctagtctttgtgggcaactgtctatacaagtcgtctaaacgttgtttactcatatagtatcgaacagccatcattacatggtcccgttccgttgatagataatcgagtatgttagtggacttgtcaaatctatataccatattttctggaagtggatatacatagtcgtgatcaacattattgctagcctcatcttctatatcctgtactataccatctacataatctacgatattattacacataaacatcgacaacatactattgtttattatctaagtcctgttgatccaaacccttgatctcctctatttgtactatctagagattgtacttcttccagttctggataatatatacgttgatagattagctgagctattctatctccagtatttacattaaacgtacattttccattattaataagaatgactcctatgtttcccctataatcttcgtctattacaccacctcctatatcaatgccttttagtgacagaccagacctaggagctattctaccatagcaaatcttaggcatggacatactaatatctgtcttaattaactgtctttctcctggagggatagtataatcgtaagcgctatacaaatcatatccggcagcacccggcgattgcctagtaggagatttagctctgttagtttccttaacaaatctaactggtgagttaatattcatgttgaacataaaactaatattttatttcaaaattatttaccatcccatatattccatgaataagtgtgatgattgtacacttctatagtatctatatacgattcacgataaaatcctcctatcaatagcagtttattatccactatgatcaattctggattatccctcggataaataggatcatctatcagagtccatgtattgctggattcacaataaaattccgcatttctaccaaccaagaataaccttctaccgaacactaacgcgcatgatttataatgaggataataagtggatggtccaaactgccactgatcatgattgggtagcaaatattctgtagttgtatcagtttcagaatgtcctcccattacgtatataacattgtttatggatgccactgctggattacatctaggtttcagaagactcggcatattaacccaagcagcatccccgtggaaccaacgctcaacagatgtgggatttggtagacctcctactacgtataatttattgttagcgggtatcccgctagcatacagtctggggctattcatcggaggaattggaatccaattgtttgatatataatttacagctatagcattgttatgtatttcattgttcatccatccaccgatgagatatactacttctccaacatgagtacttgtacacatatggaatatatctataatttgatccatgttcataggatactctatgaatggatacttgtatgatttgcgtggttgtttatcacaatgaaatattttggtacagtctagtatccattttacattatttatacctctgggagaaagataatttgacctgattacatttttgataaggagtagcagatttcctaatttatttcttcgctttatataccacttaatgacaaaatcctcatctggaacatttagttcatcgctttctagaataagtttcatagatagataatcaaaattgtctatgatgtcatcttccagttccaaaaagtgtttggcaataaagtttttagtatgacataagagattggatagtccgtattctatacccatcatgtaacactcgacacaatattcctttctaaaatctcgtaggataaagtttatacaagtgtagatgataaattctacagaggttaatatagaagcacgtaataaattgacgacgttatgactatctatatatacctttccagtatatgagtaaataactatagaagttagactgtgaatgtcaaggtctagacaaaccctcgtaactggatctttatttttcgtgtatttttgacgtaaatgtgtgcgaaagtaaggagataactttttcaatatcgtagaattgactattatattgcctcctatggcatcaataattgttttgaatttcttagtcatagacaatgctaatatattcttacagtacacagtattgacaaatatcggcatttatgtttctttaaaagtcaacatctaaagaaaaatgattatcttcttgagacataactcccattttttggtattcacccacacgtttttcgaaaaaattagttttaccttctaatgatatattttccatgaaatcaaacggattggtaacattataaatttttttaaatcccaattcagaaatcaatctatccgcgacgaattctatatatgttttcatcatttcacaattcattcctataagtttaactggaagagccgcagtaagaaattcttgttcaatggataccgcatctgttataatagatctaacggtttcttcactcggtggatgcaataaatgtttaaacatcaaacatgcgaagtcgcagtgtagaccctcgtctctactaatcaattcgttggaaaacgtgagtccgggcattaggccacgctttttaagccaaaatatggaagcgaatgatccggaaaagaagattccttctactgcagcaaaggcaataagtctctctccataaccggcgctgtcatgtatccacttttgagcccaatcggccttcttttttacacaaggcatcgtttctatggcattaaagagatagtttttttcattactatctttaacataagtatcgatcaaaagactatacatttccgaatgaatgttttcaatggccatctgaaatccgtagaaacatctagcctcggtaatctgtacttctgtacaaaatcgttccgccaaattttcattcactattccgtcactggctgcaaaaaacgccaatacatgttttataaaatatttttcgtctggtgttagtttattccaatcattgatatctttagatatatctacttcttccactgtccaaaatgatgcctctgcctttttatacatgttccagatgtcatgatattggattgggaaaataacaaatctatttggatttggtgcaaggatgggttccataactaaattaacaataacaataaattttttttcagttatctatatgcctgtacttggatcttttgtacatcgatatcgccgcaatcactacaataattacaagtattattgatagcattgttattagtactatcataattaaattatcgttattatcattttgtaattgtgacatcatactagataaatcgtttgcgagattgttgtgggaagcgggcatggaggatgaattatcgttattattatttaaagcctcccattcggattcacaaatatggcgcgcgttcaacattttatggaaacagataacaagaaaactcgtcatcgttcaaatttttaacgatagtaaaccgattaaacgtcgagctaatttctaacgctagcgactctgttggatatgggtttccagatatatatcttttcagttcccctacgtatctataatcatctgtaggaaatggaagatatttccatttatctactgttcctaatatcatatgtggtggtgtagtagaaccattaagcgcgaaagatgttatttcgcatcgtattttaacttcgcaataatttctggttagataacgcactctaccagtcaagtcaatgatattagcctttacagatatattcatagtagtcgtaacgatgactccatcttttagatgcgatactcctttgtatgtaccagaatcttcgtacctcaaactcgatatatttaaacaagttaatgagatattaacgcgttttatgaatgatgatatataaccagaagttttatcctcggtggctagcgctataaccttatcattataataccaactagtgtgattaatatgtgacacgttagtgtgggtacaaatatgtacattatcgtctacgtcgtattcgatacatccgcatacagccaacaaatataaaatgacaaatactctaacgccgttcgtacccatcttgatgcggtttaataaatgttttgatttcaatttattgtaaaaaaagattcggttttatactgttcgatattctcattgcttatattttcatctatcatctccacacagtcaaatccgtggttagcatgcacctcatcaaccggtaaaagactatcggactcttctatcattataactctagaatatttaatttggtcattattaatcaagtcaattatcttatttttaacaaacgtgagtattttactcattttttataaaaacttttagaaatatacagactctatcgtgtgtctatatcttctttttatatccaatgtatttatgtctgatttttcttcatttatcatatataatggtccaaattctacacgtgcttcggattcatccagatcattaaggttcttataattgtaacatccttctcttccctcttctacatcttccttcttattcttattcttagcgtcacagaatctaccacagcaggatcccatgacgagcgtcatattaaactaatccattttcaattataatatacgattagtaatgaccattaaaataaaaatattcttcataaccggcaagaaagtgaaaagttcacattgaaactatgtcagtagtatacatcatgaaatgatgatatatatatactctattttggtggaggattatatgatataattcgtggataatcattcttaagacacatttcttcattcgtaaatcttttcacgttaaatgagtgtccatattttgcaatttcttcatatgatggcggtgtacgtggacgaggctgctcctgttcttgttgtagtcgccgactgtcgtgtctgcgtttagatccctccattatcgcgattgcgtagatggagtactattttataccttgtaattaaatttttttattaattaaacgtataaaaacgttccgtatctgtatttaagagccagatttcgtctaatagaacaaatagctacagtaaaaataactagaataattgctacacccactagaaaccacggatcgtaatacggcaatcggttttcgataataggtggaacgtatattttatttaaggacttaacaattgtctgtaaaccacaatttgcttccgcggatcctgtattaactatctgtaaaagcatatgttgaccgggcggagccgaacattctccgatatccaatttctgtatatctataatattattaacctccgcatacgcattacagttcttttctagcttggataccgcactaggtacatcgtctagatctattcctatttcctcagcgatagctcttctatccttttccggaagcaatgaaatcacttcaataaatgattcaaccatgagtgtgaaactaagtcgagaattactcatgcatttgttagttattcggagcgcgcaatttttaaactgtcctataacctctcctatatgaatagcacaagtgacattagtagggatagaatgttgagctaatttttgtaaataactatctataaaaagattatacaaagttttaaactctttagtttccgccatttatccagtctgagaaaatgtctctcataataaatttttccaagaaactaattgggtgaagaatggaaacctttaatctatatttatcacagtctgttttggtacacatgatgaattcttccaatgccgtactaaattcgatatctttttcgatttctggatatgtttttaataaagtatgaacaaagaaatggaaatcgtaataccagttatgtttaactttgaaattgttttttattttcttgttaatgattccagccacttgggaaaagtcaaagtcgtttaatgccgatttaatacgttcattaaaaacaaactttttatcctttagatgaattattattggttcattggaatcaaaaagtaagatattatcgggtttaagatctgcgtgtaaaaagttgtcgcagcatggtagttcgtaaattttaatgtataacagagccatctgtaaaaagataaactttatgtattgtaccaaagatttaaatcctaatttgatagctagctcggtatctactttatctgccgaatacagtgctaggggaaaaattataatatttcctctttcgtattcgtagttagttctcttttcatgttcgaaaaagtgaaacatgcggttaaaatagtttataacattaatattactgttaataactgccggataaaagtgggatagtaatttcacgaatttgatactgtcctttctctcgttaaacgcctttaaaaaaactttagaagaatatctcaatgatagttcctgaccatccatagtttgtatcaataatagcaacatatgaagaacacgtttatacagagtatgtaaaaatgttaatttatagtttaatcccatggcccacgcacacacgattaattttttttcatctccctttagattgttgtatagaaatttgggtactgtgaactccgccgtagtttccatgggactatataattttgtggcctcgaatacaaattttactacatagttatctatcttaaagactataccatatcctcctgtagatatgtgataaaaatcgtcgtttataggataaaatcgtttatccttttgttggaaaaaggatgaattaatgtaatcattctcttctatctttagtagtgtttccttattaaaattcttaaaataatttaacaatctaactgatggagcccaattttggtgtaaatctaattgggacattatattgttaaaatacaaacagtctcctaatataacagtatctgataatctatggggagacatccattgatattcaggggatgaatcattggcaacacccatttattgtacaaaaagccccaatttacaaacgaaagtccaggtttgatagagacaaactattaactattttgtctctgtttttaatttctttggtaatgaaattattcacaatatcagtatcttctttatctaccagagattttactaacttgataaccttggctgtctcattcaatagggtagtaatatttgtatgtgtgatattgatatcttttagaagtgattctttgatggtgccagcatacgaattacaataatgcagaaactcggttaacatgcaggaattatagtaagccaattccaattgttgcctgtgttgtattagagtgtcaatatgagcaatggtgtccttgcgtttctctgatagaatgcgagcagcgattttggcgttatcatttgacgatatttctggaatgacgaatcctgtttctactaactttttggtaggacaaagtgaaacaatcaagaagatagcttctcctcctatttgtggaagaaattgaactcctctagatgatctccttgacagatattggaccgaattacagaagtacctggaatgtaaagccctgaaaccccctcattttttaagcagattgttgccgtaaatcctgcactatgcccaagatagagagctcctttggtgaatccatctctatgtttcagtttaaccaagaaacagtcagctggtctaaaatttccatctctatctaatacagcatctaacttgatgtcaggaactatgaccggttatgttatatgtaacattgagtaaatccttaagttcataatcatcactgtcatcagttatgtacgatccaaacaatgtttctactggcatagtggatacgaagatgctatccatcagaatgtttccctgattagtattttctatatagctattcttctttaaacgattttccaaatcagtaactatgttcatttttttaggagtaggacgcctagccagtatggaagaggattttctagatcctctcttcaacatctttgatctcaatggaatgcaaaaccccatagtgtaacaaccaacgataaaaataatattgtttttcactttttataattttaccatctgactcatggattcattaatatctttataagagctactaacgtataattctttataactgaactgagatatatacaccggatctatggtttccataattgagtaaatgaatgctcggcaataactaatggcaaatgtataaaacaacgaaattatactagagttgttaaagttaatattttctatgagctgttccaataaattatttgttgtaactgcgttcaagtcataaatcatcttgatactatccagtaaaccgtttttaagttctggaatattattatcccattgtaaagcccctaattcgactatcgaatatcctgctctgatagcagtttcaatatcgacggacgtcaatactgtaataaaggtggtagtattgtcatcatcgtgataaactactggaatatggtcgttagtaggtacggtaactttacacaacgcgatatataactttccttttgtaccatttttaacgtagttgggacgtcctgcagggtattgttttgaagaaatgatatcgagaacagatttgatacgatatttgttggattcctgattatttactataatataatctagacagatagatgattcgataaatagagaaggtatatcgttggtaggataatacatccccattccagtattctcggatactctattaatgacactagttaagaacatgtcttctattctagaaaacgaaaacatcctacatggactcattaaaacttctaacgctcctgattgtgtctcgaatgcctcgtacaaggatttcaaggatgccatagattctttgaccaacgatttagaattgcgtttagcatctgatttttttattaaatcgaatggtcggctctctggtttgctaccccaatgataacaatagtcttgtaaagataaaccgcaagaaaatttatacgcatccatccaaataaccctagcaccatcggatgatattaatgtattattatagattttccatccacagttattgggccagtatactgttagcaacggtatatcgaatagattactcatgtaacctactagaatgatagttcgtgtactagtcataatatctttaatccaatctaagaaatttaaaattagattttttacactgttaaagttaacaaaggtattacccggatacgtggatatcatatatggtattggtccattatcagtaatagctccataaactgatacggcgatggtttttatatgtgtttgatctaacgaggaagaaattcgcgcccacaattcatctctagatatgtatttaatatcaaacggtaacacatcaatttcgggacgcgtatatgtttctaaatttttaatccaaatataatgatgacctatatgccctattatcatactgtcaactatagtacacctagagaacttacgatacatctgtttcctataatcgttaaattttacaaatctataacatgctaaaccttttgacgacaaccattcattaatttctgatatggaatctgtattctcaataccgtatcgttctaaagccagtgctatatctccctgttcgtgagaacgctttcgtataatatcgatcaacggataatctgaagtttttggagaataatatgactcatgatctatttcgtccataaacaatctagacataggaattggaggcgatgatcttaattttgtgcaatgagtcgtcaatcctataacttctaatattgtaatattcatcatcgacataacactatctatgttatcatcgtatattagtataccatgaccttcttcatttcgtgccaaaatgatatacagtcttaaatagttacgcaatatctcaatagtttcataattgttagctgttttcatcaaggtttgtatcctgtttaacatgatggcgttctatacgtttctattttttaaatttttaacgatttactgtggctagatacccaatctctctcaaatatttttttagcctcgcttacaagctgtttatctatactattaaaactgacgaatccgtgattttggtaatgggttccgtcgaaatttgccgaagtgatatgaacatattcgtcgtcgactatcaacaattttgtattattctgaatagtgaaaaccttcacagatagatcattttgaacacacaacgcgtctagacttctggcggttgccatagaatatacgtcgttcttatcccaattaccaactagaagtctgatcttaactcctctattaatggctgcttctataatggagttgtaaatgtcgggccaatagtagctattaccgtcgacacgtgtagtgggaactatggccaaatgttcaatatctatactagtcttagccgacttgagtttatcaataactacatcagtgtctagatctctagaatatcccaataggtgttccggagaatcagtaaagaacactccacctataggattcttaatatgatacgcagtgctaactggcagacaacaagccgcagagcataaattcaaccatgaattttttgcgctattaaaggctttaaaagtatcaaatcttctacgaagatctgtggccagcgggggataatcagaatatacacctaacgttttaatcgtatgtatagatcctccagtaaatgacgcgtttcctacataacatctttcattatctgacacccaaaaacaaccgagtagtagtcccacattattttttttatctatattaacggttataaaatttatatccgggcagtgactttgtagctctcccagatttcttttccctcgttcatctagcaaaactattattttaatccctttttcagatgcctcttttagtttatcaaaaataagcgctcccctagtcgtactcagaggattacaacaaaaagatgctatgtatatatatttcttagctagagtgataatttcgttaaaacattcaaatgttgttaaatgatcggatctaaaatccatattttctggtagtgtttctaccagcctacattttgctcccgcaggtaccggtgcaaatggccacatttagttaacataaaaacttatacatcctgttctatcaacgattctagaatatcatcggctatatcgctaaaattttcatcaaagtcgacatcacaacctaactcagtcaatatattaagaagttccatgatgtcatcttcgtctatttctatatccgtatccattgtagattgttgaccgattatcgagtttaaatcattactaatactcaatccttcagaatacaatctgtgtttcattgtaaatttataggcggtgtatttaagttggtagattttcaattatgtatcaatatagcaacagtagttcttgctcctccttgattctagcatcctcttcattattttcttctacgtacataaacatgtccaatacgttagacaacacaccgacgatggcggccgccacagacacgaatatgactaaaccgatgaccatttaaaaacccctctctagctttcacttaaactgtatcgattattcttttagaacatgtataatataaaaacattattctatttcgaatttaggcttccaaaaatttttcatccgtaaaccgataataatatatatagacttgttaatagtcggaataaatagattaatgcttaaactatcatcatctccacgattagagatacaatatttacattttttttgctgtttcgaaactttatcaatacacgttaatacaaacccaggaaggagatattgaaactgaggctgttgaaaatgaaacggtgaatacaataattcagataatgtaaaatcatgattccgtattctgatgatattagaactgctaatggatgtcgatggtatgtatctaggagtatctattttaacaaagcatcgatttgctaatatacaattatcattttgattaattgttattttattcatattcttaaaaggtttcatatttatcaattcttctacattaaaaatttccatttttaatttatgtagccccgcaatactcctcattacgtttcattttttgtctataatatccattttgttcatctcggtacatagattatccaattgagaagcgcatttagtagttttgtacattttaagtttattgacgaatcgtcgaaaactagttatagttaacattttattatttgataccctgatattaatacccctgccgttactattatttataactgatgtaatccacgtaacattggaattaactatcgatagtaatgcatcgacgcttccaaaattgtctattataaactcaccgataatttttttattacatgttttcatattcattaggattattaaatctttaatcttactacgattgtatgcgttgatattgcaagacgtcattctaaaagacggaggatctccatcaaatgccagacaatcacgtacaaagtacatggaaataggttttgttctattgcgcatcatagatttatatagaacacccgtagaaatactaatttgttttactctataaaatactaatgcatctatttcatcgttttgtataacgtctttccaagtgtcaaattccaaatttttttcattgatagtaccaaattcttctatctctttaactacttgcatagataggtaattacagtgatgcctacatgccgttttttgaaactgaatagatgcgtctagaagcgatgctacgctagtcacaatcaccactttcatatttagaatatatatatgtaaaaatatagtagaatttcattttgttttttttctatgctataaatgaattctcattttgcatctgctcatactccgttttatatcaataccaaagaaggaagatatctggttctaaaagccgttaaagtatgcgatgttagaactgtagaatgcgaaggaagtaaagcttcctgcgtactcaaagtagataaaccctcatcacccgcgtgtgagagaagaccttcgtccccttccagatgcgagagaatgaataacccaggaaaacaagttccgtttatgaggacggacatgctacaaaatatgttcgcggctaatcgcgataatgtagcttctagacttttgtcctaaaatacaattatatccttttcgatattaataaatccgtgtcgtccaggttttttatctctttcagtatgtgaatagataggtattttatctctattcatcatcgaatttaagagatccgataaacattgtttgtattctccagatgtcagcatctgatacaacaatatatgtgcacataaacctctggcacttatttcatgtaccttccccttatcactaaggagaatagtatttgagaaatatgtatacatgatattatcatgaattagatatacagaatttgtaacactctcgaaatcacacgatgtgtcggcgttaagatctaatatatcactcgataacacattttcatctagatacactagacattttttaaagctaaaatagtctttagtagtaacagtaactatgcgattattttcatcgatgatacatttcatcggcatattattacgcttaccatcaaagactataccatgtgtatatctaacgtattctagcatggttgccatacgcgcattaaacttttcaggatctttggatagatcttccaatctatctatttgagaaaacatttttatcatgttcaatagttgaaacgtcggatccactatatagatattatctataaagattttaggaactacgttcatggtatcctggcgaatattaaaactatcaatgatatgattatcgttttcatcttttatcaccatatagtttctaagatatgggattttacttaatataatattatttcccgtaataaattttattagaaatgccaaatctataagaaaagtcctcgaattagtttgaagaatatctatatcgccgtaccgtatatttggattaattagatatagagaatatgatccgtaacatatacaacttttattatggcgtctaagatattcttccatcaacttattaacatttttgactagggaagatacattatgacgtcccattacttttgccttgtctattactgcgacgttcatagaatttagcatatctcttgccaattcttccattgatgttacattataagaaattttagatgaaattacatttggagctttaatagtaagaactcctaatatgtccgtgtatgtggtcactaatacagattgtagttctataatcgtaaataatttacctatattatatgtttgagtctgtttagaaaagtagctaagtatacgatcttttatttctgatgcagatgtatcaacatcggaaaaaaatctttttttattcttttttactaaagatacaaatatgtctttgttaaaaacagttattttctgaatatttctagcttgtaattttaacatatgatattcgttcacactaggtactctgcctaaataggtttctataatctttaatgtaatattaggaaaagtattctgatcaggattcctattcattttgaggatttaaaactctgattattgtctaatatggtctcaacacaaactttttcacagagcgatagagtttttgataactcgtttttcttaagaaatataaaactactgtctccagagctcgctctatcttttattttatttaattcgatacaaactcctgatactggttcagaaagtaattcattaattttcagtcctttatagaagatatttaatatagataatacaaaatcttcagtttttgatatcgatctgattgatcctagaactagatatattaataacgtgctcattaggcagtttatggcagcttgataattagatatagtatattccagttcatatttattagataccgcattgcccagattttgatattctatgaattcctctgaaaataaatccaaaataactagacattctattttttgtggattagtgtactctcttccctctatcatgttcactactggtgtccacgatgataaatatctagagggaatataatatagtccataggatgccaatctagcaatgtcgaataactgtaattttattcttcgctcttcattatgaattgattcttgaggtataaacctaacacaaattatattattagacttttcgtatgtaatgtctttcatgttataagtttttaatcctggaatagaatctattttaatgaggcttttaaacgcagagttctccaacgagtcaaagcataatactctgttggttttcttatatacgatgttacgattttcttctttgaatggaataggtttttgaattagtttataattacaacataatagataaggaagtgtgcaaatagtacgcggaaaaaacataatagctcccctgttttcatccatggttttaagtaaatgatcactggcttctttagtcaatggatattcgaacattaaccgtttcatcatcattggacagaatccatatttcttaatgtaaagagtgatcaaatcattgtgtttattgtaccatcttgttgtaaatgtgtattcggttatcggatctgctcctttttctattaaagtatcgatgtcgatctcgtctaagaattcaactatatcgacatatttcatttgtatacacataaccattactaacgtagaatgtataggaagagatgtaacgggaacagggtttgttgattcgcaaactattctaatacataattcttctgttaatacgtcttgcacgtaatctattatagatgccaagatatctatataattattttgtaagatgatgttaactatgtgatctatataagtagtgtaataattcatgtatttcgatatatgttccaactctgtctttgtgatgtctagtttcgtaatatctatagcatcctcaaaaaatatattcgcatatattcccaagtcttcagttctatcttctaaaaaatcttcaacgtatggaatataataatctattttacctcttctgatatcattaatgatatagtttttgacactatcttctgtcaattgattcttattcactatatctaagaaacggatagcgtccctaggacgaactactgccattaatatctctattatagcttctggacataattcatctattataccagaattaatgggaactattccgtatctatctaacatagttttaagaaagtcagaatctaagacctgatgttcatatattggttcatacatgaaatgatctctattgatgatagtgactatttcattctctgaaaattggtaactcattctatatatgctttccttgttgatgaaggatagaatatactcaatagaatttgtaccaacaaactgttctcttatgaatcgtatatcatcatctgaaataatcatgtaaggcatacatttaacaattagagacttgtctcctgttatcaatatactattcttgtgataatttatgtgtgaggcaaatttgtccacgttctttaattttgttatagtagatatcaaatccaatggagctacagttcttggcttaaacagatatagtttttctggaacgaattctacaacattattataaaggactttgggtagataagtgggatgaaatcctattttaattaatgcgatagccttgtcctcgtgcagatatccaaacgcttttgtgatagtatggcattcattgtctagaaacgctctacgaatatctgtgacagatatcatctttagagaatatactagtcgcgttaatagtactacaatttgtattttttaatctatctcaataaaaaaattaatatgtatgattcaatgtataactaaactactaactgttattgataactagaatcagaatctaatgatgacgtaaccaagaagtttatctactgccaatttagctgcattatttttagcatctcgtttagattttccatctgccttatcgaatactcttccgtcgatatctacacaggcataaaatgtaggagagttactaggccccactgattcaatacgaaaagaccaatctctcttagttatttggcagtactcattaataatggtgacagggttagcatctttccaatcaataatttttttagccggaataacatcatcaaaagacttatgatcctctctcattgatttttcgcgggatacatcatctattatggcgtcagccataacatcagcatccggcttatccgcctccgttgtcataaaccaacgaggaggaatatcgtcggagctgtacaccatagcactacgttgaagatcgtacagagctttattaacttctcgcttctccatattaagttgtctagttagttgtgcagcagtagctccttcgattccaatgtttttaatagccgcacacacaatctctgcgtcagaacgctcgtcaatatagatcttagacatttttagagagaactaacacaaccagcaataaaactaatttattttatcatttttttattcatcatcctctggtggttcgtcgtttctatcgaatgtggatctgattaacccgtcatctataggtgatgctggttctggagattctggaggagatggattattatctggaagaatctctgttatttccttgttttcatgtatcgattgcgttgtaacattaagattgcgaaatgctctaaatttgggaggcttaaagtgttgtttgcaatctctacacgcatgtctaactagtggaggttcgtcagcggctctagtttgaatcatcatcggcgtagtattcctacttttacagttaggacacggtgtattgtatttctcgtcgagaacgttaaaataatcgttgtaactcacatcctttattttatctatattgtattctactcctttcttaatgcattttataccgaataagagatagcgaaggaattctttttcggtgccgctagtacccttaatcatatcacatagtgttttatattccaaatttgtggcaatagacggtttatttctatacgatagtttgtttctggaatcctttgagtattctataccaatattattctttgattcgaatttagtttcttcgatattagattttgtattacctatattcttgatgtagtactttgatgatttttccatggcccattctattaagtcttccaagttggcatcatccacatattgtgatagtaattctcggatatcagtagcggctaccgccattgatgtttgttcattggatgagtaactactaatgtatacattttccatttataacacttatgtattaactttgttcatttatattttttcattattatgttgatattaacaaaagtgaatatatatgttaataattgtattgtggttatacggctacaatttcataatgagtggaagtcagtgtccgatgatcaatgacgatagctttactctgaaaagaaagtatcaaatcgatagtgcggagtcaacaataaaaatggataagaagaggataaagtttcagaatagagccaaaatggtaaaagaaataaatcagacaataagagcagcacaaactcattacgagacattgaaactaggatacataaaatttaagagaatgattaggactactactctagaagatatagcaccatctattccaaataatcagaaaacttataaactattctcggacatttcagccatcggcaaagcatcacagaatccgagtaagatggtatatgctctgctgctttacatgtttcccaatttgtttggagatgatcatagattcattcgttatagaatgcatccaatgagtaaaatcaaacacaagatcttctctcctttcaaacttaatcttattagaatattagtggaagaaagattctataataatgaatgcagatctaataaatggagaataattggaacacaagttgataaaatgttgatagctgaatctgataaatatacaatagatgcaaggtataacctaaaacccatgtatagaatcaagggaaaatctgaagaagataccctctttatcaaacagatggtagaacaatgtgtgacatcccaggaattggtggaaaaagtgttgaagatactgtttagagatttgttcaagagtggagaatacaaagcgtacagatacgatgatgatgtagaaaatggatttattggattggatacactaaaattaaacattgttcatgatatagttgaaccatgtatgcctgttcgtaggccagtggctaagatactgtgtaaagaaatggtaaataaatactttgagaatccgctacatattattggtaaaaatcttcaagagtgcattgactttgttagtgaataggcatttcatctttctccaatactaattcaaattgttaaattaataatggatagtataaatagttattagtgataaaatagtaaaaataattattagaataagagtgtagtatcatagataactctcttctataaaaatggattttattcgtagaaagtatcttatatacacagtagaaaataatatagattttttaaaggatgatacattaagtaaagtaaacaattttaccctcaatcatgtactagctctcaagtatctagttagcaattttcctcaacacgttattactaaggatgtattagctaataccaatttttttgttttcatacatatggtacgatgttgtaaagtgtacgaagcggttttacgacacgcatttgatgcacccacgttgtacgttaaagcattgactaagaattatttatcgtttagtaacgcaatacaatcgtacaaggaaaccgtgcataaactaacacaagatgaaaaatttttagaggttgccgaatacatggacgaattaggagaacttataggcgtaaattatgacttagttcttaatccattatttcacggaggggaacccatcaaagatatggaaatcatttttttaaaactgtttaagaaaacagacttcaaagttgttaaaaaattaagtgttataagattacttatttgggcttacctaagcaagaaagatacaggcatagagtttgcggataatgatagacaagatatatacactctatttcaacaaactggtagaatagtccatagcaatctaacagaaacgtttagagattatatctttcccggagataagactagctattgggtgtggttaaacgaaagtatagctaatgatgcggatattgttcttaatagacacgccattaccatgtatgataaaattcttagttatatatactctgagataaaacaaggacgcgttaataaaaacatgcttaagttagtttatatctttgagcctgaaaaagatatcagagaacttctgctagaaatcatatatgatattcctggagatatcctatctattattgatgcaaaaaacgacgattggaaaaaatattttattagtttttataaagctaattttattaacggtaatacatttattagtgatagaacgtttaacgaggacttattcagagttgttgttcaaatagatcccgaatatttcgataatgaacgaattatgtctttattctctacgagtgctgcggacattaaacgatttgatgagttagatattaataacagttatatatctaatataatttatgaggtgaacgatatcacattagatacaatggatgatatgaagaagtgtcaaatctttaacgaggatacgtcgtattatgttaaggaatacaatacatacctgtttttgcacgagtcggatcccatggtcatagagaacggaatactaaagaaactgtcatctataaaatccaagagtagacggctgaacttgtttagcaaaaacattttaaaatattatttagacggacaattggctcgtctaggtcttgtgttagatgattataaaggagacttgttagttaaaatgataaaccatcttaagtctgtggaggatgtatccgcattcgttcgattttctacagataaaaaccctagtattcttccatcgctaatcaaaactattttagctagttataatatttccatcatcgtcttatttcaaaggtttttgagagataatctatatcatgtagaagaattcttggataaaagcatccatctaaccaagacggataagaaatatatacttcaattgataagacacggtagatcatagaacagaccaaatatattattaataatttgtatatacatagatataattatcacacatttttgataaatgggaactgctgcaacaattcagactcccaccaaattaatgaataaagaaaatgcagaaatgattttggaaaaaattgttgatcatatagttatgtatattagtgacgaatcaagtgattcagaaaataatcctgaatatattgattttcgtaacagatacgaagactatagatctctcattataaaaagtgatcacgagtttgtaaagctatgtaaaaatcatgcagagaaaagttctccagaaacgcaacaaatgattatcaaacacatatacgaacaatatcttattccagtatctgaagtactattaaaacctataatgtccatgggtgacataattacatataacggatgtaaagacaatgaatggatgctagaacaactctctaccctaaactttaacaatctccgcacatggaactcatgtagcataggcaatgtaacgcgtctgttttatacattttttagttatctgatgaaagataaactaaatatataagtataatcccattctaatactttaacctgatgtattacctgcatcttattagaatattaacctaactaaaagacataacatagttgataaaaagcggtaggatataaatattatggctgccaccgttccgcgttttgacgacgtgtacaaaaatgcacaaagaagaattctagatcaagaaacattttttagtagaggtctaagtagaccgttaatgaaaaacacatatctatttgataattacgcgtatggatggataccagaaactgcaatttggagtagtagatacgcaaacttagatgcaagtgactattatcccatttcgttgggattacttaaaaagttcgagtttctcatgtctctatataaaggtcctattcccgtatatgaagaaaaagtaaatactgaattcattgctaatggatcgttctctggtagatacgtatcatatcttcgaaagttttctgcccttccaacaaacgagtttattagttttttgttactgacttccattccaatctataatatcttgttctggtttaaaaatactcagtttgatattactaaacacacattattcagatacgtctatacagataatgccaaacacctggcgttggctaggtatatgcatcaaacaggagactataagcctttgtttagtcgtctcaaagagaattatatatttaccggtcccgttccaataagtatcaaagatatagatcaccctaatcttagtagagcaagaagtccatccgattatgagacattagctaatattagtactatattgtactttaccaagtatgatccggtattaatgtttttattgttttacgtacctgggtattcaattactacaaaaattactccagccgtagaatatctaatggataaactgaatctaacaaagagcgacgtacaactgttgtaaattattttatgcttcgtaaaatgtaggttttgaaccaaacattctttcaaagaatgagatgcataaaactttattatccaatagattgactatttcggacgtcaatcgtttaaagtaaacttcgtaaaatattctttgatcactgccgagtttaaaacttctatcgataattgtttcatatgttttaatatttacaagttttttggtccatggtacattagccggacaaatatatgcaaaataatatcgttctccaagttctatagtttctggattatttttattatattcagtaaccaaatacatattagggttatctgcggatttataatttgagtgatgcattcgactcaacataaataattctagaggagacgatctactatcaaattcggatcgtaaatctgtttctaaagaacggagaatatctatacatacctgattagaattcatccgtccttcagacaacatctcagacagtctggtcttgtatgtcttaatcatattcttatgaaacttggaaacatctcttctagtttcactagtacctttattaattctctcaggtacagattttgaattcgacgatgctgagtatttcatcgttgtatatttcttcttcgattgcataatcagattcttatataccgcctcaaactctattttaaaattattaaacaatactctattattaatcagtcgttctaactctttcgctatttctatagacttatcgacatcttgactgtctatctctgtaaacacggagtcggtatctccatacacgctacgaaaacgaaatctgtaatctataggcaacgatgttttcacaatcggattaatatctctatcgtccatataaaatggattacttaatggattggcaaaccgtaacataccgttagataactctgctccatttagtaccgattctagatacaagatcattctacgtcctatggatgtgcaactcttagccgaagcgtatgagtatagagcactatttctaaatcccatcagaccatatactgagttggctactatcttgtacgtatattgcatggaatcatagatggccttttcagttgaactggtagcctgttttagcatctttttatatctggctctctctgccaaaaatgttcttaatagtctaggaatggttccttctatcgatctatcgaaaattgctatttcagagatgaggttcggtagtctaggttcacaatgaaccgtaatatatctaggaggtggatatttctgaagcaagagctgattatttatttcttcttccaatctattggtactaacaacgacaccgactaatgtttccggagatagatttccaaagatacacacattaggatacagactgttataatcaaagattaatacattattactaaacattttttgttttggagcaaataccttaccgccttcataaggaaacttttgttttgtttctgatctaactaagatagttttagtttccaacaatagctttaacagtggacccttgatgactgtactcgctctatattcgaataccatggattgaggaagcacatatgttgacgcacccgcgtctgtttttgtttctactccataatactcccacaaatactgacacaaacaagcatcatgaatacagtatctagccatatctaaagctatgtttagattataatccttatacatctgagctaaatcaacgtcatcctttccgaaagataatttatatgtatcattaggtaaagtaggacatgatagtacgactttaaatccattttcccaaatatctttacgaattactttacatataatatcctcatcaacagtcacataattacctgtggttaaaacctttgcaaatgcagcggctttgcctttcgcgtccgtagtatcgtcaccgatgaacgtcatttctctaactcctctatttaatactttacccatgcaactgaacgcgttcttggatatagaatccaatttgtacgaatccaatttttcagatttttgaatgaatgaatatagatcgaaaaatatagttccattattgttattaacgtgaaacgtagtattggccatgccgcctactcccttatgactagactgatttctctcataaatacagagatgtacagcttcctttttgtccggagatctaaagataatcttctctcctgttaataactctagacgattagtaatatatctcagatcaaagttatgtccgttaaaggtaacgacgtagtcgaacgttagttccaacaattgtttagctattcgtaacaaaactatttcagaacatagaactagttctcgttcgtaatccatttccattagtgactgtatcctcaaacatcctctatcgacggcttcttgtatttcctgttccgttaacatctcttcattaatgagcgtaaacaataatcgtttaccacttaaatcgatataacagtaacttgtatgcgagattgggttaataaatacagaaggaaacttcttatcgaagtgacactctatatctagaaataagtacgatcttgggatatcgaatctaggtatttttttagcgaaacagttacgtggatcgtcacaatgataacatccattgttaatctttgtcaaatattgctcgtccaacgagtaacatccgtctggagatatcccgttagaaatataaaaccaactaatattgagaaattcatccatggtggcattttgtatgctgcgtttctttggctcttctatcaaccacatatctgcgacggagcattttctatctttaatatctagattataacttattgtctcgtcaatgtctatagttctcatctttcccaacggcctcgcattaaatggaggaggagacaatgactgatatatttcgtccgtaactacgtaataaaagtaatgaggaaatcgtataaatacggtctcgccatttcgacatctggatttcagatataaaaatctgttttcaccgtgactttcaaaccaattaatgcaccgaacatccatttatagaatttagaaatatattttcatttaaatgaatcccaaacattggggaagagccgtatggaccattatttttatagtactttcgcaagcgggtttagacggcaacatagaagcgtgtaaacgaaaactatatactatagtcagcactcttccatgtcctgcatgtagacggcacgcgactatcgctatagaggacaataatgtcatgtctagcgatgatctgaattatatttattattttttcatcagattatttaacaatttggcatctgatcccaaatacgcgatcgatgtgacaaaggttaaccctttataaacttaacccattataaaacttatgattagtcacgactgaaataaccgcgtgattattttttggtataattctacacggcatggtttctgtaactatgaattcaacccccgttacattagtgaaatctttaacaaacagcaagggttcgtcaaagacataaaactcattgtttacaatcgaaatagaccccctatcacacttaaaataaaaaatatccttatcctttaccaccaaataaaattctgattggtcaatgtgaatgtattcacttaacagttccacaaatttatttattaactccgaggcacatacatcgtcggtattttttatggcaaactttactcttccagcatccgtttctaaaaaaatattaacgagttccatttatatcatccaatattattgaaatgacgttgatggacagatgatacaaataagaaggtacggtacctttgtccaccatctcctccaattcatgctctattttgtcattaactttaatgtatgaaaacagtacgccacatgcttccatgacagtgtgtaacactttggatacaaaatgtttgacattagtataattgtccaagactgtcaatctataatagatagtagctataatatattctatgatggtattgaagaagatgacaatcttggcatattgatcatttaacacagacatggtatcaacagatagcttgaatgaaagagaatcagtaattggaataagcgtcttctcgatagagtgtccgtataccaacatgtctgatattttgatgtattccattaaattatttagttttttctttttattctcgttaaacagcatttctgtcaacggaccccaacatcgttgaccgattaagttttgattgatttttccgtgtaaggcgtatctagtcagatcgtatagcctatccaataatccatcatctgtgcgtagatcacatcgtacactttttaattctctatagaagagcgacagacagcaatttctttattctctacagatgtaagatacttgaagacattcctatgatgatgcagaattttggataacacggtattgatggtatctgttaccataattcctttgatggctgatagtgtcagagcacaagatttccaatctttgttttgatatctatatcagacagcatggtgcgtctgacaacacaaggattaagacggaaagatgaaatgattctctcaacatcttcaatggataccttgctattttttctggcattatctatatgtgcgagaatatcctctagagaatcagtatcctttttgatgatagtggatctcaatgacatgggacgtctaaaccttcttattctatcaccagattgcatggtgatttgtcttctttcttttatcataatgtaatctctaaattcatcggcaaattgtctatatctaaaatcataatatgagatgtttacctctacaaatatctgttcgtccaatgttagagtatctacatcagttttgtattccaaattaaacatggcaacggatttaattttatattcctctattaagtcctcgtcgataataacagaatgtagataatcatttaatccatcgtacatggttggaagatgcttgttgacaaaatctttaattgtcttgatgaaggtgggactatatctaacatcttgattaataaaatttataacattgtccataggatactttgtaactagttttatacacatctcttcatcggtaagtttagacagaatatcgtgaacaggtggtatattatattcatcagatatacgaagaacaatgtccaaatctatattgtttaatatattatatagatgtagcgtagctcctacaggaatatctttaactaagtcaatgatttcatcaaccgttagatctattttaaagttaatcatataggcattgatttttaaaaggtatgtagccttgactacattctcattaattaaccattccaagtcactgtgtgtaagaagattatattctatcataagcttgactacatttggtcccgataccattaaagaattcttatgatataaggaaacagattttaggtactcatctactctacaagaattttggagagccttaacgatatcagtgacgtttattatttcaggaggaaagaatctaacattgagaatatcggaattaatagcttccagatacagtgattttggcaatagtccgtgtaatccataatccagtaacacgagctggtgcttgctagacaccttttcaatgtttaatttttttgaaataagctttgataaagccttcctcgcaaattccggatacatgaacatgtcggcgacatgattaagtattgttttttcattattttctcaacaagttctcaataccccaatagatgatagaatatcacccaatgcgtccatgttgtctatttccaacaggtcgctatatccaccaatagaagtttttccaaaaaagattctaggaacagttctaccaccagtaatttgttcaaaatagtcacgcaattcattttcgggtttaaattctttaatatcgacaatttcatacgctcctcttttgaaactaaacttatttagaatatccagtgcatttctacaaaaaggacatgtatacttgacaaaaattgtcactttgttattggccaacctttgttgtacaaattcctcggccattttaatatttaagtgatataaaactatctcgacttatttaactctttagtcgagatatatggacgcagatagctatatgatagccaactacagaaggcaaacgctataaaaaacataattacgacgagcatatttataaatatttttattcagcattacttgatatagtaatattaggcacagtcaaacattcaaccactctcgatacattaactctctcattttctttaacaaattctacaatatcttcgtaaaaagattcttgaaactttttagaatatctatcgactctagatgaaatagcgttcgtcaacatactatgttttgtatacataaaggcgcccattttaacagtttctagtgacaaaatgctagcgatcctaggatcctttagaatcacatagattgacgattcgtctctcttagtaactctagtaaaataatcatacaatctagtacgcgaaataatattatccttgacttgaggagatctaaacaatctagttttgagaacatcgataagttcatcgggaatgacatacatactatctttaatagaactcttttcatccagttgaatggattcgtccttaaccaactgattaatgagatcttctattttatcattttccagatgatatgtatgtccattaaagttaaattgtgtagcgcttctttttagtctagcagccaatactttaacatcactaatatcgatatacaaaggagatgatttatctatggtattaagaattcgtttttcgacatctgtcaaaaccaattcctttttgcctgtatcatccagttttccatcctttgtaaagaaattattttctactagactattaataagactgataaggattcctccataattgcacaatccaaactttttaacaaaactagactttacaagatctacaggaatgcgtaattcaggtttcttagcttgtgattttttcttttgtggacattttcttgtgaccaactcatctaccatttcattgattttagcagtgaaataagctttcaatgcacgggcactgatactattgaaaacgagttgatcttcaaattccgccatttaagttcaccaaacaacttttaaatacaaatatatcaatagtagtagaataagaactataaaaaaaataataattaaccaataccaaccccaacaaccggtattattagttgatgtgactgttttctcatcacttagaacagatttaacaatttctataaagtctgtcaaatcatcttccggagaccccataaatacaccaaatatagcggcgtacaacttatccatttatacattgaatattggcttttctttatcgctatcttcatcatattcatcatcaatatcaacaagtcccagattacgagccagatcttcttctacattttcagtcattgatacacgttcactatctccagagagtccgataacgttagccaccacttctctatcaatgattagtttcttgagtgcgaatgtaatttttgtttccgttccggatctatagaagacgataggtgtgataattgccttggccaattgtctttctcttttactgagtgattctagttcaccttctatagatctgagaatggatgattctccagtcgaaacatattctaccatggatccgtttaatttgttgatgaagatggattcatccttaaatgttttctctgtaatagtttccaccgaaagactatgcaaagaatttggaatgcgttccttgtgcttaatgtttccatagacggcttctagaagttgatacaacataggactagccgcggtaacttttatttttagaaagtatccatcgcttctatcttgtttagatttatttttataaagtttagtctctccttccaacataataaaagtggaagtcatttgactagataaactatcagtaagttttatagagatagacgaacaattagcgtattgagaagcatttagtgtaacgtattcgatacattttgcattagatttactaatcgattttgcatactctataacacccgcacaagtctgtagagaatcgctagatgcagtaggtcttggtgaagtttcaactctcttcttgattaccttactcatgattaaacctaaataattgtactttgtaatataatgatatatattttcactttatctcatttgagaataaaaatgtttttgtttaaccactgcatgatgtacagatttcggaatcgcaaaccaccagtggttttattttatccttgtccaatgtgaattgaatgggagcggatgcgggtttcgtacgtagatagtacattcccgtttttagaccgagactccatccgtaaaaatgcatactcgttagtttggaataactcggatctgctatatggatattcatagattgactttgatcgatgaaggctcccctgtctgcagccatttttatgatcgtcttttgtggaatttcccaaatagttttataaactcgcttaatatcttctggaaggtttgtattctgaatggatccaccatctgccataatcctattcttgatctcatcattccataattttctctcggttaaaactctaaggagatgcggattaactacttgaaattctccagacaatactctccgagtgtaaatattactggtatacggttccaccgactcattatttcccaaaatttgagcagttgatgcagtcggcataggtgccaccaataaactatttctaagaccgtatgttctgattttatcttttagaggttcccaattccaaagatccgacggtacaacattccaaagatcatattgtagaataccgttactggcgtacgatcctacatatgtatcgtatggtccttccttctcagctagttcacaactcgcctctaatgcaccgtaataaatggtttcgaagatcttcttatttagatcttgtgcttccaggctatcaaatggataatttaagagaataaacgcgtccgctaatccttgaacaccaataccgataggtctatgtctcttattagagatttcagcttctggaataggataataattaatatctataattttattgagatttctgacaattactttgaccacatccttcagtttgagaaaatcaaatcgcccatctattacaaacatgttcaaggcaacagatgccagattacaaacggctacctcattagcatccgcatattgtattatctcagtgcaaagattactacacttgatagttcctaaattttgttgattactctttttgttacacgcatccttataaagaatgaatggagtaccagtttcaatctgagattctataatcgctttccagacgactcgagcctttattatagatttgtatctcctttctctttcgtatagtgtatacaatcgttcgaactcgtctccccaaacattgtccaatccaggacattcatccggacacatcaacgaccactctccgtcatccttcactcgtttcataaagagatcaggaatccaaagagctataaatagatctctggttctatgttcctcgtttcctgtattctttttaagatcgaggaacgccataatatcagaatgccacggttccaagtatatggccataactccaggccgtttgtttcctccctgatctatgtatctagcggtgttattataaactctcaacattggaataataccgtttgatataccattggtaccggagatatagcttccactggcacgaatattactaattgatagacctattccccctgccattttagagattaatgcgcatcgttttaacgtgtcatagataccctctatgctatcatcgatcatgttaagtagaaaacagctagacatttggtgacgactagttcccgcattaaataaggtaggagaagcgtgcgtaaaccatttttcagaaagtagattgtacgtctcaatagctgagtctatatcccattgatgaattcctactgcgacacgcattaacatgtgctgaggtctttcaacgatcttgttgtttattttcaacaagtaggatttttccaaagttttaaaaccaaaatagttgtatgaaaagtctcgttcgtaaataataaccgagttgagtttatccttatatttgttaactatatccatggtgatacttgaaataatcggagaatgtttcccatttttaggattaacatagttgaataaatcctccatcacttcactaaatagtttttttgtttccttgtgtagatttgatacggctattctggcggctagaatggcataatccggatgttgtgtagtacaagtggctgctatttcggctgccagagtgtccaattctaccgttgttactccattatatattccttgaataaccttcatagctattttaataggatctatatgatccgtgtttaagccataacataattttctaatacgagacgtgattttatcaaacatgacattttccttgtatccatttcgtttaatgacaaacatttttgttggtgtaataaaaaaaattatttaacttttcattaatagggatttgacgtatgtagcgtacaaaattatcgttcctggtatatagataaagagtcctatatatttgaaaatcgttacggctcgattaaactttaatgattgcatagtgaatatatcattaggatttaactccttgactatcatggcggcgccagaaattaccatcaaaagcattaatacagttatgccgatcgcagttagaacggttatagcatccaccatttatatctaaaaattagatcaaagaatatgtgacaaagtcctagttgtatactgagaattgacgaaacaatgtttcttacatattttttttttattagtaaccgacttaatagtaggaactggaaaactagacttgattattctataagtatagatacccttccaaataatattctctttgataaaagttccagaaaatgtagaattttttaaaaagttatcttttgctattaccaagattgtgtttagacgcttattattaatatgagtgatgaaatccacaccgcctctagatatcgcttttatttccacattagatggtaaatccaatagtgaaactatctttttaggaatgtatggactcgcgtttagaggagtgaacgtcttaggcgtcggaaaggatgattcatcaaacgaataaacaatttcacaaatggatgttaatgtattagtaggaaattttttgacgctagtggaattgaagattctaatggatgatgttctacctatttcatccgataacatgttaatttccgacaccaacggttttaatatttcgatgatatacggtagtctctctttcggacttatatagcttattccacaatacgagtcattatatactccaaaaaacaaaataactagtataaaatctgtatcgaatgggaaaaacgaaattatcgacataggtatagaatctggaacattgaacgtattaatacttaattctttttctgtggtaagtaccgataggttattgacattgtatggttttaaatattctataacttgagacttgatagatattagtgatgaattgaaaattatttttatcaccacgtgtgtttcaggatcatcgtcgacgcccgtcaaccaaccgaatggagtaaaataaatatcattaatatatgctctagatattagtatttttatcaatcctttgattatcatcttctcgtaggcgaatgattccatgatcaagagtgatttaagaacatcctccggagtattaatgggcttagtaaacagtccatcgttgcaataataaaagttatccaagttaaaggatattatgcattcgtttaaagatatcacctcatctgacggagacaattttttggtaggttttagagactttgaagctacttgtttaacaaagttattcatcgtcgtttactattctatttaattttgtagttaatttatcacatatcacattaattgactttttggtccatttttccatacgtttatattcttttaatcctgcgttatccgtttccgttatatccagggatagatcttgcaagttaaatagaatgctcttaaataatgtcattttcttatccgctaaaaatttaaagaatgtataaacctttttcagagatttgaaactcttaggtggtgtcctagtacacaatatcataaacaaactaataaacattccacattcagattccaacagctgattaacttctacattaatacagcctattttcgctccaaatgtacattcgaaaaatctgaataaaacatcgatgtcacaatttgtattatccaatacagaatgtttgtgattcgtgttaaaaccatcggagaaggaataaaaataaaaattattatagtggtggaattcagttggaatattgcctccggagtcataaaaggatactaaacattgttttttatcataaattacacatttccaatgagacaaataacaaaatccaaacattacaaatctagaggtagaacttttaattttgtctttaagtatatacgataagatatgtttattcataaacgcgtcaaatttttcatgaatcgctaaggagtttaagaatctcatgtcaaattgtcctatataatccacttcggatccataagcaaactgagagactaagttcttaatacttcgattgctcatccaggctcctctctcaggctctattttcatcttgacgacctttggattttcaccagtatgtattcctttacgtgataaatcatcgattttcaaatccatttgtgagaagtctatcgccttagatactttttcccgtagtcgaggtttaaagaaatacgctaacggtatactagtaggtaactcaaagacatcatatatagaatggtaacgcgtctttaactcgtcggttaactctttcttttgatcgagttcgtcgctactattgggtctgctcaggtgccccgactctactagttccaacatcataccgataggaatacaagacactttgccggcggttgtagatttatcatatttctccactacatatccgttacaatttgttaaaaatttagatacatctatattgctacataatccagctagtgaatatatatgacataataaattggtaaatcctagttctggtattttactaattactaaatctgtatatctttccatttatcatggaaaagaatttaccagatatcttcttttttccaaactgcgttaatgtattctcttacaaatattcacaagatgaattcagtaatatgagtaaaacggaacgtgatagtttctcattggcggtgtttccagttataaaacatagatggcataacgcacacgttgtaaaacataaaggaatatacaaagttagtacagaagcacgtggaaaaaaagtatctcctccatcactaggaaaacccgcacacataaacctaaccgcgaagcaatatatatacagtgaacacacaataagctttgaatgttatagttttctaaaatgtataacaaatacagaaatcaattcgttcgatgagtatatattaagaggactattagaagctggtaatagtttacagatattttccaattccgtaggtaaacgaacagatactataggtgtactagggaataagtatccatttagcaaaattccattggcctcattaactcctaaagcacaacgagagatattttcagcgtggatttctcatagacctgtagttttaactggaggaactggagtgggtaagacgtcacaggtacccaagttattgctttggtttaattatttatttggtggattctctactctagataaaatcactgactttcacgaaagaccagtcattctatctcttcctaggatagctttagttagattgcatagcaataccattttaaaatcattgggatttaaggtactagatggatctcctatttctttacggtacggatctataccggaagaattaataaacaaacaaccaaaaaaatatggaattgtattttctacccataagttatctctaacaaaactatttagttatggcactcttattatagacgaagttcatgagcatgatcaaataggagatattattatagcagtagcgagaaagcatcatacgaaaatagattctatgtttttaatgactgccacgttagaggatgacagggaacggctaaaagtatttttacctaatcccgcatttatacatattcctggagatacactgtttaaaattagcgaggtatttattcataataagataaatccatcttccagaatggcatacatagaagaagaaaagagaaatttagttactgctatacagatgtatactcctcctgatggatcatccggtatagtctttgtggcatccgttgcacagtgtcacgaatataaatcatatttagaaaaaagattaccgtatgatatgtatattattcatggtaaggtcttagatatagacgaaatattagaaaaagtgtattcatcacctaatgtatcgataattatttctactccttatttggaatccagcgttactatacgcaatgttacacacatttatgatatgggtagagtttttgtccccgctccttttggaggatcgcaagaatttatttctaaatctatgagagatcaacgaaaaggaagagtaggaagagttaatcctgggacatacgtatatttctatgatctgtcttatatgaagtctatacagcgaatagattcagaatttctacataattatatattgtacgctaataagtttaatctaacactccccgaagatttgtttataatccctacaaatttggatattctatggcgtacaaaggaatatatagactcgttcgatattagtacagaaacatggaataaattattatccaattattatatgaagatgatagagtatgctaaactttatgtactaagtcctattctcgctgaggagttggataattttgagaggacgggagaattaactagtattgtacaagaagccattttatctctaaatttacgaattaagattttaaattttaaacataaagatgatgatacgtatatacacttttgtaaaatattattcggtgtctataacggaacaaacgctactatatattatcatagacctctaacgggatatatgaatatgatttcagatactatatttgttcctgtagataataactaaaaatttttatctagtataaaaaggcgcgccttatgtgtaatgtaatttgactcctttgagcactggctcagagtcgtcttcatcaaatttgcagcaggatccacaagaacaacagcccttgagacaactacagcaactggtcatacagcaaagcataattgtcaccattactatggcaatcaagccagctatgaaacctagccaaatgtaccatggccatttgatatactgctcatactttccaagttcttggagatcgatgagagattcatttaaattcttggcaacctcattgaggcggtcaatttctttctgaatgtttacaactgaagcattaatgccagagatgtcacctaaatcaacatctggtgatgtatgattcttgaaatatttatctaactcctccttgaatgagtctaattcaggttgcaaaggatcataaactgtgttgttgacaattcctattacaacatcacagttaccagacacaaatgtgttgtctgtagtaatgatttgtggttcatagaaattcctttgtgttacaaaccagtgtgtgccatttgaaacaaagacaccttcacgaggaaagtgtgctttaccatcatgacaaatggcaggagcagttgtgaagttcttctcttgtgcagggacataagtcacatgcaagaagactacaccatgaggtgctgactgagggaaggacataagatgatagccctttccacagaaatcaactctcttagattgtccaagtacacactctgacatcttagtagcagcaagattagcagaagctctgatttctgcagctctaattaattgttgagtcacatatgtctgcaaactttgaagtctgcctgtgatcaacctatcaatttgcacttcagcctcaactttgtcaagacgtgaaaggatatcatttaatacacttgaaattgcaccaaagttggagctaagttgtttaacaagcgtgtttaaagcttgtgcattctggttgaccacatcttgaagtttaccaagtgcacttgctgtggaagaaagtgagtcttgaatcttgccaatagcactattaaattggttggcaatcaatttctggttctcatagagaacattctgtgtaactccaataccattaaacctataagccatttgcatagcaaatggtatttgtaatgcagcacctgcaccaaaggtccaaccagaagtgattgtacccgctaacagtgcagaagtgtattgagcaatcatttcatctgtgagcaaaggtggcaatacagtaaggccgttaaacttctgtgcacaaatgaggtctctagcagcaatatcaccaaggcaatcaccatattgtttgatgaagccagcatctgcaagtgtcactttgttgaatagtagatcttcaataaatgacctcttgcttggtttagatggatctggtaatatttgtgagaaattaaatccaccgaaatctttaattggtggtgtcttgtaaatttgtttgacttgtgcaaatacttcttgggtgttcttgtcttgttcaacagctattccagttaaagcacggtttaattgtgtacagaaactgccatattgcaacaatagattgctgcattcagttgaatcaccacaaatgtacattgtacaatctactgatgtcttggtcatagacactggtagaatctctgtggtaacactaatagtaaagtttgtgggtatggcaatagagttattagagtaagcaactgaattctctgcaccaagtgacatagtgtaggcaatgatggattgactagctacactacgtgcccgccgaggagaattagtctgagtctgataactagcgcatatacctgcaccaatgggtatgtcacactcatatgagttgttgacatgttcagctcctattaaacagcctgcacgtgtttgaaatacattagaacctgtagaataaacacgccaagtaggagtaagttgatctgcatgaatagcaacagggacttctgtgcagttaacatcctgataaagaacagcaacctggttagaagtatttgttcctggtgttataacactgacaccaccaaatgaacatggtgtaatgtcaagaatctcaagtgtctgtggatcacggacagcatcagtagtgtcagcaatgtctctgccaaattgttggaaaggcagaaacttcttgttagactcagtaagaacacctgtgcctgttaaaccattgaagttgaaattgacacatttgttcttaaccaaattagtagacttcttaggtccacaaacagttgctggtgcatgtagaagttcaaatgaaagtactactactctgtatggttggtaaccaacaccattagtgggttggaaaccatatgattgtaaaggaaagtaacaattaaatccttcaacaccattacaaggtgtgctaccggcctgatagatttcagttgaaatatctctctcgaaaggtttgagattagacttcctaaacaatctatacaggtaattataattaccaccaaccttagaatcaagattgttagaattccaagctataacgcagcctgtaaagtcatctggtaatttataattataatcagcaatctttccagtttgccctggagcgatttgtctgacttcatcacctctaattacaaatgaatctgcatagacattagtaaagcagagatcatttaatttagtaggagacactccataacacttaaatgtggagaatgatgcggaattatataggacagaataatcagcaacacagttgctgattctcttcctgttccaagcataaacagatgcaaatctggtggcgttaaatacttcaccgaaagggcacaagtttgtaatattaggaaatctaacaatagattctgttggttggactctaaagttagaagtttgatagattcctttctctacagtgaaggatttcaacgtacactttgtttctgagagagggtcaagtgcacagtctacagcatctgtaatggttccattctcattatatttcaataggaaagtcctaggttgaagataacccacataataagctgcagcaccagctgtccaacctgaagaagaatcaccaggagtcaaataacttctatgtaaagcaagtaaagtttgaaacctagtgatgttaatacctattggcaaatctaccaatggttctaaagccgagaaaccctgagggagatcacgcactaaattaataggcgtgtgcttagaatatatcttgaaataaccatcaatattcttaaacacaaattccctaagattcttgaaattaccctgtttaccttcaaggtccataaggaaaggctgagagacatattcgaaagtgcaattattcgcactagaataaactctgaactcactttccatccaactcttgttgttcttgtggtaataaacacccaagaatggatcattacagaattgaaattcacagactttaataacaacattagtagcgttattaacaataagtagggactgggtcttcgaatctaaagtagtaccaaatatccagcctcttattatgttagacttctcagtggaagcgaaataaacaccatcattaaatggtaggacagggttatcaaacctcttagtaccattggtcccagagacatgtatagcatggaaccaagtaacattggagaagaaaggtaagaacaagtcctgagttgaatgtaatactgaggatctgaatactttgtcagggtaataaacaccacgtgtgaaagaattagtgtatgcaggtggtaattgagttctggttgtaagattaacacactgactagagactagtggcaataagacaagaaagacaaacatggtggcggcgtttatcttatttatgattatttctcgctttcaatttaacacaaccctcaagaacctttgtatttattttcaatttttataaaaatcaaactctaatgaccacatctttttttagagatgaaaaattttccacatctccttttgtagacacgactaaacattttgcagaaaaaagtttattagtgtttagataatcgtatacttcatcagtgtagatagtaaatgtgaacagataaaaggtattcttgctcaatagattggtaaattccatagaatatattaatcctttcttcttgagatcccacatcatttcaaccagagacgttttatccaatgatttacctcgtactataccacatacaaaactagattttgcagtgacgtcgtatctggtattcctaccaaacaaaattttacttttagttcttttagaaaattctaaggtagaatctctatttgccaatatgtcatctatggaattaccactagcaaaaaatgatagaaatatatattgatacatcgcagctggttttgatctactatactttaaaaacgaatcagattccataattgcctgtatatcatcagctgaaaaactatgttttacacgtattccttcggcatttctttttaatgatatatcttgtttagacaatgataaagttatcatgtccatgagagacgcgtctccgtatcgtataaatatttcattagatgttagacgcttcattaggggtatacttctataaggtttcttaatcagtccatcattggttgcgtcaagaactactatcggatgttgttgggtatctctagtgttacacatggccttactaaagtttgggtaaataactatgatatctctattaattatagatgcatatatttcatttgtcaaggatattagtatcgacttgctatcgtcattaatacgtgtaatgtaatcatataaatcatgcgatagccaaggaaaatttaaatagatgttcatcatataatcgtcgctataattcatattaatacgttgacattgactaatttgtaatatagcctcgccacgaagaaagctctcgtattcagtttcatcgataaaggataccgttaaatataactggttgccgatagtctcatagtctattaagtggtaagtttcgtacaaatacagaatccctaaaatattatctaatgttggattaatctttaccataactgtataaaatggagacggagtcataactattttaccgtttgtacttactggaatagacgaaggaataatctccggacatgctggtaaagacccaaatgtctgtttgaagaaatccaatgttccaggtcctaatctcttaacaaaaattacgatattcgatcccgatatcctttgcattctatttaccagcatatcacgaactatattaagattatctatcatgtctattctcccaccgttatataaatcgcctccgctaagaaacgttagtatatccatacaatggaatacttcatttctaaaatagtattcgttttctaattctttaatgtgaaatcgtatactagaaagggaaaaattatctttgagttttccgttagaaaagaaccacgaaactaatgttctgattgcgtccgattccgttgctgaattaatggatttacaccaaaaactcatataacttctagatgtagaagcattcgctaaaaaattagtagaatcaaaggatataagtagatgttccaacaagtgagcaattcccaagatttcatctatatcattctcgaatccgaaattagaaattcccaagtagatatcctttttcatccgatcgttgatgaaaatacgaactttattcggtaagacaatcatttactaaggagtaaaataggaagtaatgttcgtatgtcgttatcatcgtataaattaaaggtgtgttttttaccattaagtgacattataattttaccaatattggaattataatataggtgtatttgcgcactcgcgacggttgatgcatcggtaaatatagctgtatctaatgttctagtcggtatttcatcatttcgctgtctaataatagcgttttctctatctgtttccattacagctgcctgaagtttattggtcggataatatgtaaaataataagaaatacatacgaataacaaaaataaaataagatataataaagatgccatttagagatctaattttgtttaacttgtccaaattcctacttacagaagatgaggaatcgttggagatagtgtcttccttatgtagaggatttgaaatatcttatgatgacttgataacttactttccagataggaaataccataaatatatttctaaagtatttgaacatgtagatttatcggaggaattaagtatggaattccatgatacaactctgagagatttagtctatcttagattgtacaagtattccaagtgtatacggccgtgttataaattaggagataatctaaaaggcatagttgttataaaggacaggaatatttatattagagaagcaaatgatgacttgatagaatatctcctcaaggaatacactcctcagatttatacatattctaatgagcgcgtccccataactggttcaaaattaattctttgtggattttctcaagttacatttatggcgtatacaacgtcgcatataacaacaaataaaaaggtagatgttctcgtttccaaaaaatgtatagatgaactagtcgatccaataaattatcaaatacttcaaaatttatttgataaaggaagcggaacaataaacaaaatactcaggaagatattttattcggtaaccggtggccaaactccataatttgctttttctatttcggattttagaatttccaaattcaccagcgatttatcggttttggtgaaatccaaggatttattaatgtccacaaatgccatttgttttgtctgtggattgtatttgaaaatggaaacgatgtagttagatagatgcgctgcaaagtttcctattagggttccgcgctttacgtcacccagcatacttgaatcaccatcctttaaaaaaaatgataagatatcaacatggagtatatcatactcggattttaattcttctactgcatcactgacattttcacaaatactacaatacggtttaccgaaaataatcagtacgttcttcatttatgggtatcaaaaacttaaaatcgttactgctggaaaataaatcactgacgatattagatgataatttatacaaagtatacaatggaatatttgtggatacaatgagtatttatatagccgtcgccaattgtgtcagaaacttagaagagttaactacggtattcataaaatacgtaaacggatgggtaaaaaagggagggcatgtaaccctttttatcgatagaggaagtataaaaattaaacaagacgttagagacaagagacgtaaatattctaaattaaccaaggacagaaaaatgctagaattagaaaagtgtacatccgaaatacaaaatgttaccggatttatggaagaagaaataaaggcagaaatgcaattaaaaatcgataaactcacatttcaaatatatttatctgattctgataacataaaaatatcattgaatgagatactaacacatttcaacaataatgagaatgttacattattttattgtgatgaacgagacgcagaattcgttatgtgtctcgaggctaaaacacatttctctaccacaggagaatggccgttgataataagtaccgatcaggatactatgctatttgcatctactgataatcatcctaagatgataaaaaacttaactcaactgtttaaatttgttccctcggcagaggataactatttagcaaaattaacggcgttagtgaatggatgtgatttctttcctggactctatggggcatctataacacccaccaacttaaacaaaatacaattgtttagtgattttacaatcgataatatagtcactagtttggcaattaaaaattattatagaaagactaactctaccgtagacgtgcgtaatattgttacgtttataaacgattacgctaatttagacgatgtctactcgtatgttcctccttgtcaatgcactgttcaagaatttatattttccgcattagatgaaaaatggaacaattttaaatcatcttatttagagaccgttccgttaccctgccaattaatgtatgcattagaaccacgcaaggagattgatgtttcagaagttaaaactttatcatcttatatagatttcgaaaatactaaatcagatatcgatgttataaaatctatatcttcgatcttcggatattctaacgaaaactgtaacactatagtgttcggcatctataaggataatttactactgagtataaatagttcattttactttaacgatagtctgttaataaccaatactaaaagtgataatataataaatataggttactagattaaaaatggtgttccaactcgtgtgctctacgtgcggcaaagatatttctcacgaacgatataaattgattatacgaaaaaaatcattaaaggatgtactcgtcagtgtaaagaacgaatgttgtaggttaaaattatctacacaaatagaacctcaacgtaacttaacagtgcaacctctattggatataaactaatatggatccggttaattttatcaagacatatgcgcctagaggttctattatttttattaattataccatgtcattaacaagtcatttgaatccatcgatagaaaaacatgtgggtatttattatggtacgttattatcggaacacttggtagttgaatctacctatagaaaaggagttcgaatagtcccattggatagtttttttgaaggatatcttagtgcaaaagtatacatgttagagaatattcaagttatgaaaatagcagctgatacgtcattaactttattgggtattccgtatggatttggtcataatagaatgtattgttttaaattggtagctgaatgttataaaaatgccggtattgatacatcgtctaaacgaatattaggtaaagatatttttctgagccaaaacttcacagatgataatagatggataaagatatatgattctaataatttaacattttggcaaattgattaccttaaagggtgagttaatatgcataactactcctccgttgttttttccctcgttctttttcttaacgttgtttgccatcactctcataatgtaaagatattctaaaatggtaaacttttgcatatcggacgcagaaattggtataaatgttgtaattgtattatttcccgtcaatggactagtcacagctccatcagttttatatcctttagagtatttctcactcgtgtctaacattctagagcattccatgatctgtttatcgttgatattggccggaaagatagattttttattttttattatattactattggcaattgtagatataacttctggtaaatatttttctaccttttcaatctcttctattttcaagccggctatatattctgctatattgttgctagtatcaataccttttctggctaagaagtcatatgtggtattcactatatcagttttaactggtagttccattagcctttccacttctgcagaataatcagaaattggttctttaccagaaaatccagctactataataggctcaccgatgatcattggcaaaatcctatattgtaccagattaatgagagcatatttcatttccaataattctgctagttcttgagacattgatttatttgatgaatctagttggttctctagatactctaccatttctgccgcatacaataacttgttagataaaatcagggttatcaaagtgtttagcgtggctagaatagtgggcttgcatgtattaaagaatgcggtagtatgagtaaaccgttttaacgaattatatagtctccagaaatctgtggcgttacatacatgagccgaatgacatcgaagattgtccaatatttttaatagctgctctttgtccattatttctatatttgactcgcaacaattgtagataccattaatcactgattcctttttcgatgccggacaatagcacaattgtttagctttggactctatgtattcagaattaatagatatatctctcaatacagattgcactatacattttgaaactatgtcaaaaattgtagaacgacgctgttctgcagccatttaactttaaataatttacaaaaatttaaaatgagcatccgtataaaaatcgataaactgcgccaaattgtggcatatttttcagagttcagtgaagaagtatctataaatgtagactcgacggatgagttaatgtatatttttgccgccttgggcggatctgtaaacatttgggccattatacctctcagtgcatcagtgttctaccgcggagccgaaaacattgtgtttaatcttcctgtgtccaaggtaaaatcgtgtttgtgtagttttcacaatgatgccatcatagatatagaacctgatctggaaaataatctagtaaaactttctagttatcatgtagtaagtgtcgattgtaacaaggaactgatgcctattaggacagatactactatttgtctaagtatagatcaaaagaaatcttacgtgtttaattttcacaagtatgaagaaaaatgttgtggtagaaccgtcattcatttagaatggttgttgggctttatcaagtgtattagtcagcatcagcatttggctattatgtttaaagatgacaatattattatgaagactcctggtaatactgatgcgttttccagggaatattctatgactgaatgttctcaagaactacaaaagttttctttcaaaatagctatctcgtctctcaacaaactacgaggattcaaaaagagagtcaatgtttttgaaactagaatcgtaatggataatgacgataacattctaggaatgttgttttcggatagagttcaatcctttaagatcaacatctttatgacgtttttagattaatactttcaatgagataaatatgggtggcagagtaagtgttgagctccctaaacgggatccgcctccgggagtacccactgatgagatgttattaaacgtggataaaatgcatgacgtgatagctcccgctaagcttttagaatatgtgcatataggaccactagcaaaagataaagaggataaagtaaagaaaagatatccagagtttagattagtcaacacaggacccggtggtctttcggcattgttaagacaatcgtataatggaaccgcacccaattgctgtcgcacttttaatcgtactcattattggaaaaaggatggaaagatatcagataagtatgaagagggtgcagtattagaatcgtgttggccagacgttcacgacactggaaaatgcgatgttgatttattcgactggtgtcagggggatacgttcgatagaaacatatgccatcagtggatcggttcagcctttaataggagtgatagaactgtagagggtcaacaatcgttaataaatctgtataataagatgcaaacattatgtagtaaagatgctagtgtaccaatatgtgaatcatttttgcatcatttacgcgcacacaatacagaagatagcaaagagatgatcgattatattctaagacaacagtctgcggactttaaacagaaatatatgagatgtagttatcccactagagataagttagaagagtcattaaaatatgcggaacctcgagaatgttgggatccagagtgttcgaatgccaatgttaatttcttactaacacgtaattataataatttaggactttgcaatattgtacgatgtaatactagcgtgaacaacttacagatggataaaacttcctcattaagattgtcatgtggattaagcaatagtgatagattttctactgttcccgtcaatagagcaaaagtagttcaacataatattaaacattcgttcgacctaaaattgcatttgatcagtttattatctctcttggtaatatggatactaattgtagctatttaaatgggtgccgcggcaagcatacagacgacggtgaatacactcagcgaacgtatctcgtctaaattagaacaagaagcgaacgctagtgctcaaacaaaatgtgatatagaaatcggaaatttttatatccgacaaaaccatggatgtaacctcactgttaaaaatatgtgctctgcggacgcggatgctcagttggatgctgtgttatcagccgctacagaaacatatagtggattaacaccggaacaaaaagcatacgtaccagctatgtttactgctgcgttaaacattcagacgagtgtaaacactgttgttagagattttgaaaattatgtgaaacagacttgtaattctagcgcggtcgtcgataacaaattaaagatacaaaacgtaatcatagatgaatgttacggagccccaggatctccaacaaatttggaatttattaatacaggatctagcaaaggaaattgtgccattaaagcgttgatgcaattgacgactaaggccactactcaaatagcacctagacaagttgctggtacaggagttcagttttatatgattgttatcggtgttataatattggcagcgttgtttatgtactatgccaagcgtatgttgttcacatccaccaatgataaaatcaaacttattttagccaataaggaaaacgtccattggactacttacatggacacattctttagaacttctccgatggttattgctaccacggatatgcaaaactgaaaatatattgataatattttaatagattaacatggaagttatcgctgatcgtctagacgatatagtgaaacaaaatatagcggatgaaaaatttgtagattttgttatacacggtctagagcatcaatgtcctgctatacttcgaccattaattaggttgtttattgatatactattatttgttatagtaatttatatttttacggtacgtctagtaagtagaaattatcaaatgttgttggcgttggtggcgctagtcatcacattaactattttttattactttatactataatagtactagactgacttctaacaaacatctcacctgccataaataaatgcttgatattaaagtcttctatttctaacactattccatctgtggaaaataatactctgacattatcgctaattgacacatcggtgagtgatatgcctataaagtaataatcttctttgggcacatataccagtgtaccaggttctaacaacctatttactggtgctcctgtagcatactttttctttaccttgagaatatccatcgtttgcttggtcaatagcgatatgtgattttttatcaaccactcaaaaaagtaattggagtgttcatatcctctacgggctattgtctcatggccgtgtatgaaatttaagtaacacgactgtggtagatttgttctatagagccggttgccgcaaatagatagaactaccaatatgtctgtacaaatgttaaacattaattgattaacagaaaaaacaatgttcgttctgggaatagaaaccagatcaaaacaaaattcgttagaatatatgccacgtttatacatggaatataaaataactacagtttgaaaaataacagtatcatttaaacatttaacttgcggggttaatttcacaactttactgtttttaaactgttcaaaatatagcatcgatccatgagaaatacgtttagccgcctttaatagaggaaatcccaccgcctttctggatctcaccaacgacgatagttctgaccagcaacttatttcttcatcatccacctgttttaacatataataggcaggagatagatatccgtcattgcaatattccttttcgtaggcacacaatctaatattgataaaatctccattctcttctctgcatttattatcttgtttcggtggctgattaggctgtagtcttggtttaggctttggtatatcgttgttgaatctattttggtcattaaatctttcatttcttcctggtatatttctatcacctcgtttggttggatttttgtctatattatcgtttgtaacatcggtacgggtattcatttatcacaaaaaaaacttctctaaatgagtctactgctagaaaacctcatcgaagaagataccatattttttgcaggaagtatatctgagtatgatgatttacaaatggttattgccggcgcaaaatccaaatttccaagatctatgctttctatttttaatatagtacctagaacgatgtcaaaatatgagttggagttgattcataacgagaatatcacaggggcaatgtttaccacaatgtataatataagaaacaatttgggtctaggagatgataaactaactattgaagccattgaaaactatttcttggatcctaacaatgaggttatgcctcttatcattaataatacggatatgactgccgtcattcctaaaaaaagtggtaggagaaagaataagaacatggttattttccgtcaaggatcatcacctatcttgtgtattttcgaaactcgtaaaaagattaatatttataaagaaaatatggaatccgcgtcgactgagtatacacctatcggagacaacaaggctttgatatctaaatatgcgggaattaatgtcctgaatgtgtattctccttccacatccatgagattgaatgccatttacggattcaccaataaaaataaactagagaaacttagtactaataaggaactagaatcgtatagttctagccctcttcaagaacccattaggttaaatgattttctgggactattggaatgtgttaaaaagaatattcctctaacagatattccgacaaaggattgattactataaatggagaatgttcctaatgtatactttaatcctgtgtttatagagcccacgtttaaacattctttattaagtgtttataaacacagattaatagttttatttgaagtattcattgtattcattctaatatatgtattttttagatctgaattaaatatgttcttcatgcctaaacgaaaaatacccgatcctattgatagattacgacgtgctaatctagcgtgtgaagacgataaattaatgatctatggattaccatggatgacaactcaaacatctgcgttatcaataaatagtaaaccgatagtgtataaagattgtgcaaagcttttgcgatcaataaatggatcacaaccagtatctcttaacgatgttcttcgcagatgatgattcattttttaagtatttggctagtcaagatgatgaatcttcattatctgatatattgcaaatcactcaatatctagactttctgttattattattgatccaatcaaaaaataaattagaagccgtgggtcattgttatgaatctctttcagaggaatacagacaattgacaaaattcacagactttcaagattttaaaaaactgtttaacaaggtccctattgttacagatggaagggtcaaacttaataaaggatatttgttcgactttgtgattagtttgatgcgattcaaaaaagaatcctctctagctaccaccgcaatagatcctattagatacatagatcctcgtcgcgatatcgcattttctaacgtgatggatatattaaagtcgaataaagtgaacaataattaattctttattgtcatcatgaacggcggacatattcagttgataatcggccccatgttttcaggtaaaagtacagaattaattagacgagttagacgttatcaaatagctcaatataaatgcgtgactataaaatattctaacgataatagatacggaacgggactatggacgcatgataagaataattttgaagcattggaagcaactaaactatgtgatgtcttggaatcaattacagatttctccgtgataggtatcgatgaaggacagttctttccagacattgttgaattctgtgagcgtatggcaaacgaaggaaaaatagttatagtagccgcactcgatgggacatttcaacgtaaaccgtttaataatattttgaatcttattccattatctgaaatggtggtaaaactaactgctgtgtgtatgaaatgctttaaggaggcttccttttctaaacgattgggtgaggaaaccgagatagagataataggaggtaatgatatgtatcaatcggtgtgtagaaagtgttacgtcggctcataatattatattttttatctaaaaaactaaaaataaacattgattaaattttaatataatacttaaaaatggatgttgtgtcgttagataaaccgtttatgtattttgaggaaattgataatgagttagattacgaaccagaaagtgcaaatgaggtcgcaaaaaaactgccgtatcaaggacagttaaaactattactaggagaattattttttcttagtaagttacagcgacacggtatattagatggtgccaccgtagtgtatataggatctgctcccggtacacatatacgttatttgagagatcatttctataatttaggagtgatcatcaaatggatgctaattgacggccgccatcatgatcctattttaaatggattgcgtgatgtgactctagtgactcggttcgttgatgaggaatatctacgatccatcaaaaaacaactgcatccttctaagattattttaatttctgatgtgagatccaaacgaggaggaaatgaacctagtacggcggatttactaagtaattacgctctacaaaatgtcatgattagtattttaaaccccgtggcgtctagtcttaaatggagatgcccgtttccagatcaatggatcaaggacttttatatcccacacggtaataaaatgttacaaccttttgctccttcatattcagctgaaatgagattattaagtatttataccggtgagaacatgagactgactcgagttaccaaatcagacgctgtaaattatgaaaaaaagatgtactaccttaataagatcgtccgtaacaaagtagttgttaactttgattatcctaatcaggaatatgactattttcacatgtactttatgctgaggaccgtgtactgcaataaaacatttcctactactaaagcaaaggtactatttctacaacaatctatatttcgtttcttaaatattccaacaacatcaactgaaaaagttagtcatgaaccaatacaacgtaaaatatctagcaaaaattctatgtctaaaaacagaaatagcaagagatccgtacgcagtaataaatagaaacgtactactgagatatactaccgatatagagtataatgatttagttactttaataaccgttagacataaaattgattctatgaaaactgtgtttcaggtatttaacgaatcatccataaattatactccggttgatgatgattatggagaaccaatcattataacatcgtatcttcaaaaaggtcataacaagtttcctgtaaattttctatacatagatgtggtaatatctgacttatttcctagctttgttagactagatactacagaaactaatatagttaatagtgtactacaaacaggcgatggtaaaaagactcttcgtcttcccaaaatgttagagacggaaatagttgtcaagattctctaccgtcctaatataccattaaaaattgttagatttttccgcaataacatggtaactggagtagagatagccgatagatctgttatttcagtcgctgattaatcaattagtagagatgagataagaacattataataatcaataatatattttatatcttatatcttgtttagaaaaatgctaatattaaaatagctaacgctagtaatccaatcggaagccatttgatatctataatagggtatctaatttcctgattcagatagcggacagctatattctcggtagctactcgtttggaatcacaaacattatttacatctaatttactatctgtaatggaaacgtttcccaatgaaatggtacaatccgatacattgcattttgttatatttttttttaaagaggctggtaacaacgcatcgcttcgtttacatggctcgtaccaacaataatagggtaatcttgtatctattcctatccgtactatgcttttatcaggataaatacatttacatcgtatatcgtctttgttagcatcacagaatgcataaatttgttcgtccgtcatgataaaaatttaaagtgtaaatataactattattttatagttgtaataaaaagggaaatttgattgtatactttcggttctttaaaagaaactgacttgataaaaatggctgtaatctctaaggttacgtatagtctatatgatcaaaaagagattaatgctacagatattatcattagtcatgttaaaaatgacgacgatatcggtaccgttaaagatggtagactaggtgctatggatggggcattatgtaaaacttgtgggaaaacggaattggaatgtttcggtcactggggtaaagtaagtatttataaaactcatatagttaagcctgaatttatttcagaaattattcgtttactgaattatatatgtattcactgcggattattgcgttcacgagaaccgtattccgacgatattaacctaaaagagttatcgggacacgctcttaggagattaaaggataaaatattatccaagaaaaagtcatgttggaacagtgaatgtatgcaaccgtatcaaaaaattactttttcaaagaaaaaggtttgtttcgtcaacaagttggatgatattaacgttcctaattctctcatctatcaaaagttaatttctattcatgaaaagttttggccattattagaaattcatcaatatccagctaacttattttatacagactactttcccatccctccgttgattattagaccggctattagtttttggatagatagtatacccaaagaaaccaatgaattaacttacttattaggtatgatcgttaagaattgtaacttgaatgctgatgaacaggttatccagaaggcggtaatagaatacgatgatattaaaattatttctaataacacttccagtatcaatttatcatatatcacatccggcaaaaataatatgattagaagttatatcgtcgcccggcgaaaagatcagaccgctagatctgtaattggtcccagtacatctatcaccgttaatgaggtaggaatgcccgcatatattagaaatacacttacagaaaagatatttgttaatgcctttacagtggataaagttaaacaactattagcgtcaaaccaagttaaattttactttaataaacgattaaaccaattaacaagaatacgccaaggaaagtttatcaaaaataaaatacatttattgcctggtgattgggtagaagtagctgttcaagaatatacaagtattatttttggaagacagccgtctctacatagatacaacgtcatcgcttcatctatcagagctaccgaaggagatactatcaaaatatctcccggaattgtcaactctcaaaatgctgatttcgacggagatgaagaatggatgatattggagcaaaatcctaaagccgtaattgaacaaagtattcttatgtatccgacgacgttactcaaacacgatattcatggagcccccgtttatggatctattcaagatgaaatcgtagcagcgtattcattgtttaggatacaagatctttgtttagatgaagtattgaacatcttggggaaatatggaagagagttcgatcctaaaggtaaatgtaaattcagcggtaaagatatctatacttacttgataggtgaaaagattaattatccgggtctcttaaaggatggtgaaattattgcaaacgacgtagatagtaattttgttgtggctatgaggcatctgtcattggctggactcttatccgatcataagtcgaacgtggaaggtatcaactttattatcaagtcatcttatgtttttaagagatatctatctatttacggttttggggtgacattcaaagatctgagaccaaattcgacgttcactaataaattggaggccatcaacgtagaaaaaatagaacttatcaaagaagcatacgccaaatatctcaacgatgtaagagacgggaaaatagttccattatctaaagctttagaggcggactatgtggaatccatgttatccaacttgacaaatcttaatatccgagagatagaagaacatatgagacaaacgctgatagatgatccagataataacctcctgaaaatggccaaagcgggttataaagtaaatcccacagaactaatgtatattctaggtacttatggacaacagaggattgatggtgaaccagcagagactcgagtattgggtagagtcttaccttactatcttccagactctaaggatccagaaggaagaggttacattcttaattctttaacaaaaggattaacgggttctcaatattacttttcgatgctggttgcaagatctcaatctactgatatcgtctgtgaaacatcacgtaccggaacactggctagaaaaatcattaaaaagatggaggatatggtggtcgacggatacggacaagtagttataggtaatacgctcatcaagtacgccgccaattataccaaaattctaggctcagtatgtaaacctgtagatcttatctatccagatgagtccatgacttggtatttggaaattagtgctctgtggaataaaataaaacagggattcgtttactctcagaaacagaaacttgcaaaaaagacattggcgccgtttaatttcctagtattcgtcaaacccaccactgaggataatgctattaaggttaaggatctgtacgatatgattcataacgtcattgatgatgtgagagagaaatacttctttacggtatctaatatagattttatggagtatatattcttgacgcatcttaatccttctagaattagaattacaaaagaaacggctatcactatctttgaaaagttctatgaaaaactcaattatactctaggtggtggaactcctattggaattatttctgcacaggtattgtctgagaagtttacacaacaagccctgtccagttttcacactactgaaaaaagtggtgccgtcaaacaaaaacttggtttcaacgagtttaataacttgactaatttgagtaagaataagaccgaaattatcactctggtatccgatgatatctctaaacttcaatctgttaagattaatttcgaatttgtatgtttgggagaattaaatccaaacatcactcttcgaaaagaaacagataggtatgtagtagatataatagtcaatagattatacatcaagagagcagaaattaccgaattagtcgtcgaatatatgattgaacgattcatctcctttagcgtcattgtaaaggaatggggtatggaaacattcattgaggatgaggataatattagatttactgtctacctaaatttcgttgaaccggaagaattgaatcttagtaagtttatgatggttcttccgggtgccgccaacaagggcaagattagtaaattcaagattcctatctctgattatacgggatatgacgacttcaatcaaacaaaaaagctcaataagatgactgtagaactcatgaatctaaaagaattgggttctttcgatttggaaaacgtcaacgtgtatcctggagtatggaatacatacgatatcttcggtatcgaggccgctcgtgaatacttgtgcgaagccatgttaaacacctatggagaagggttcgattatctgtatcagccttgtgatcttctcgctagtttactatgtgctagttacgaaccagaatcagtgaataaattcaagttcggcgcagctagtactcttaagagagctacgttcggagacaataaagcattgttaaacgcggctcttcataaaaagtcagaacctattaacgataatagtagctgccacttttttagcaaggtccctaatataggaactggatattacaaatactttatcgacttgggtcttctcatgagaatggaaaggaaactatctgataagatatcttctcaaaagatcaaggaaatggaagaaacagaagacttttaattcttatcaataacatatttttctatgatctgtcttttaaacgatggattttccacaaatgcgcctctcaagtccctcatagaatgatacacgtataaaaaatatagcataggcaatgactccttatttttagacattagatatgccaaaatcatagccccgcttctatttactcccgcagcacaatgaaccaacacgggctcgtttcgttgatcacatttagataaaaaggcggttacgtcgtcaaaatatttactaatatcggtagttgtatcatctaccaacggtatatgaataatattaatattagagttaggtaatgtatatttatccatcgtcaaatttaaaacatatttgaacttaacttcagatgatggtgcatccatagcatttttataatttcccaaatacacattattggttactcttgtcattatagtgggagatttggctttgtgcatatctccagttgaacgtagtagtaagtatttatacaaacttttcttatccatttataacgtacaaatggataaaactactttatcggtaaacgcgtgtaatttagaatacgttagagaaaaggctatagtaggcgtacaagcagccaaaacatcaacacttatattctttgttattatattggcaattagtgcgctattactctggtttcagacgtctgataatccagtctttaatgaattaacgagatatatgcgaattaaaaatacggttaacgattggaaatcattaacggatagcaaaacaaaattagaaagtgatagaggtagacttctagccgctggtaaggatgatatattcgaattcaaatgtgtggatttcggcgcctattttatagctatgcgattggataagaaaacatatctgccgcaagctattaggcgaggtactggagacgcgtggatggttaaaaaggcggcaaaggtcgatccatctgctcaacaattttgtcagtatttgataaaacacaagtctaataatgttattacttgtggtaatgagatgttaaatgaattaggttatagcggttattttatgtcaccgcattggtgttccgattttagtaatatggaatagtgttagataaatgcggtaacgaatgttcctgtaaggaaccataacagcttagatttaacgttaaagatgagcataaacataataaacaaaattacaatcaaacctataacattaatatcaaacaatccaaaaaatgaaatcagtggagtagtaaacgcgtacataactcctggataacgtttagcagctgccgttcctattctagaccaaaaattcggtttcatgttttcgaaacggtattctgcaacaagtcgaggatcgtgttctacatatttggcggcgttatccagtatctgcctattgatcttcatttcgttttcgattctggctatttcaaaataaaatcccgatgatagacctccagactttataatttcatctacgatgttcagcgccgtagtaactctaataatataggctgataagctaacatcataccctcctgtatatgtgaatatggcatgatttttgtccattacaagctcggttttaactttattgcctgtaataatttctctcatctgtaggatatctatttttttgtcatgcattgccttcaagacgggacgaagaaacgtaatatcctcaataacgttatcgttttctacaataactacatattctacctttttattttctaactcggtaaaaaaattagaatcccatagggctaaatgtctagcgatatttcttttcgtttcctctgtacacatagtgttacaaaaccctgaaaagaagtgagtatacttgtcatcatttctaatgtttcctccagtccactgtataaacgcataatccttgtaatgatctggatcatccttgactaccacaacatttcttttttctggcataacttcattgtcctttacatcatcgaacttctgatcattaatatgctcatgaacattaggaaatgtttctgatggaggtctatcaataactggcacaacaataacaggagttttcaccgccgccatttagttattgaaattaatcatatacaactctttaatacgagttatattttcgtctatccattgtttcacatttacatatttcgacaaaaagatataaaatgcgtattccaatgcttctctgtttaatgaattactaaaatatacaaacacgtcactgtctggcaataaatgatatcttagaatattgtaacaatttattttgtattgcacatgttcgtgatctatgagttcttcttcgaatggcataggatctccgaatctgaaaacgtataaataggagttagaataataatatttgagagtattggtaatatataaactctttagcggtataattagtttttttctctcgatttctatttttagatgtgatggaaaaatgactaattttgtagcattagtatcatgaactctaatcgagatcttaatatcttcgtcacacgttagttctttgaagtttttaagagatgcatcagttggttcgaccgatggagtaggtgcaacaattttttgttcgatgtatgtatgtactggagccattgtcttaactataatggtgcttgtatcgaaaaactttaatgcagataatggaagctcttcgccgcgactttctacatcgtaattgggttctaacgccgatctctgaatggatactagttttctaagttctaatgtgattctctgaaaatgtaaatccaattcctccggcattatagatgtgtatacatcggtaaataaaactatagtatccaacgatcccttctcgcaaattctagtcttaaccaaaaaatcgtatataaccacggagatggcgtatttaagagtggattcttctaccgttttgttcttggatttcatataagaaactataaagtccgcactactgttaagaatgattactaacgcaactatatagtttaaattaagcatcttggaaacataaaataactctgtagacgatacttgactttcgaataagtttgcagacaaacgaagaaagaacagacctctcttaatttcagaagaaaactttttttcgtattcctgacgtctagagtttatatcaataagaaagttaagaattagtcggttaatgttgtatttcattacccaagtttgagatttcataatattatcaaaagacatgataatattaaagataaagcgctgactatgaacgaaatagctatatggttcgctcaagaatatagtcttgttaaacgtggaaacgataactgtatttttaatcacgtcagcggcatctaaattaaatataggtatatttattccacacactctacaatatgccacaccatcttcataataaataaattcgttagcaaaattattaattttagtgaaatagttagcgtcaactttcatagcttccttcaatctaatttgatgctcacacggtgcgaattccactctaacatcccttttccatgcctcaggttcatcgatctctataatatctagttttttgcgtttcacaaacacaggctcgtctctcgcgatgagatctgtatagtaactatgtaaatgataactagatagaaagatgtagctatatagatgacgatcctttaagagaggtatgatgactttaccccaatcagatagactgttgttatggtcttcggaaaaagaatttttataaatttttccagtattttccaaatatacgtacttaacatctaaaaaatccttaatgataataggaatggataatccgtctattttataaagaaatacatatcgcacattatacttttttttggaaatgggaataccgatgtgtctacataaatatgcaaagtctaaatattttttagagaatcttagttggtccaaattcttttccaagtacggtaatagatttttcatattgaacggtatcttcttaatctctggttctagttccgcattaaatgatgaaactaagtcactatttttataactaacgattacatcacctctaacatcatcatttaccagaatactgatcttcttttgtcgtaaatacatgtctaatgtgttaaaaaaaagatcatacaagttatacgtcatttcatctgtggtattcttgtcattgaaggataaactcgtactaatctcttctttaacagcctgttcaaatttatatcctatatacgaaaaaatagcaaccagtgtttgatcatccgcgtcaatattctgttctatcgtagtgtataacaatcgtatatcttcttctgtgatagtcgatacgttataaaggttgataacgaaaatatttttatttcgtgagataaagtcatcgtaggattttggacttatattcgcgtctagtagatatgcttttatttttggaatgatctcaattagaatagtctctttagagtccatttaaagttacaaacaactaggaaattggtttatgatgtataatttttttagtttttatagattctttattctatacttaaaaaatgaaaataaatacaaaggttcttgagggttgtgttaaattgaaagcgagaaataatcataaattatttcattatcgcgatatccgttaagtttgtatcgtaatggcgtggtcaattacaaataaagcggatactagtagcttcacaaagatggctgaaatcagagctcatctaaaaaatagcgctgaaaataaagataaaaacgaggatattttcccggaagatgtaataattccatctactaagcccaaaaccaaacgagccactactcctcgtaaaccagcggctactaaaagatcaaccaaaaaggaggaagtggaagaagaagtagttatagaggaatatcatcaaacaactgaaaaaaattctccatctcctggagtcagcgacattgtagaaagcgtggctgctgtagagctcgatgatagcgacggggatgatgaacctatggtacaagttgaagctggtaaagtaaatcatagtgctagaagcgatctttctgacctaaaggtggctaccgacaatatcgttaaagatcttaagaaaattattactagaatctctgcagtatcgacggttctagaggatgttcaagcagctggtatctctagacaatttacttctatgactaaagctattacaacactatctgatctagtcaccgagggaaaatctaaagttgttcgtaaaaaagttaaaacttgtaagaagtaaatgcgtgcacttttttataaagatggtaaactctttaccgataataattttttaaatcctgtatcagacgataatccagcgtatgaggttttgcaacatgttaaaattcctactcatttaacagatgtagtagtatatgaacaaacgtgggaggaggcgttaactagattaatttttgtgggaagtgattcaaaaggacgtagacaatacttttacggaaaaatgcatgtacagaatcgcaacgctaaaagagatcgtatttttgttagagtatataacgttatgaaacgaattaattgttttataaacaaaaatataaagaaatcgtccacagattccaattatcagttggcggtttttatgttaatggaaactatgttttttattagatttggtaaaatgaaatatcttaaggagaatgaaacagtagggttattaacactaaaaaataaacacatagaaataagtcccgatgaaatagttatcaagtttgtaggaaaggacaaagtttcacatgaatttgttgttcataagtctaatagactatataaaccgctattgaaactgacggatgattctagtcccgaagaatttctgttcaacaaactaagtgaacgaaaggtatacgaatgtatcaaacagtttggtattagaatcaaggatctccgaacgtatggagtcaattatacgtttttatataatttttggacaaatgtaaagtccatatctcctcttccgtcaccaaaaaagttaatagcgttaactatcaaacaaactgctgaagtggtaggtcatactccatcaatttcaaaaagagcttatatggcaacgactattttagaaatggtaaaggataaaaattttttagatgtagtatctaaaactacgttcgatgaattcctatctatagtcgtagatcacgttaaatcatctacggatggatgatatagatctttacacaaataattacaagaccgataaatggaaatggataagcgtatgaaatctctcgcaatgacagctttcttcggagagctaaacacattagatattatggcattgataatgtctatatttaaacgccatccaaacaataccattttttcagtggataaggatggtcagtttatgattgatttcgaatacgataattataaggcttctcaatatttggatctgaccctcactccgatatctggagatgaatgcaagactcacgcatcgagtatagccgaacaattggcgtgtgtggatattattaaagaggatattagcgaatatatcaaaactactccccgtcttaaacgatttataaaaaaataccgcaatagatcagatactcgtatcagtcgagatacagaaaagcttaaaatagctctagctaaaggcatagattacgaatatataaaagacgcttgttaataagtaaatgaaaaaaaactagtcgtttataataaaacacaatatggatgccaacatagtatcatcttctactattgcaacgtatatagacgctttagcgaagaatgcttcagaattagaacagaggtctaccgcatacgaaataaataatgaattggaactagtatttattaagccgccattaattactttgacaaatgtagtgaatatctctacgattcaggaatcgtttattcgatttaccgttactaataaggaaggtgttaaaattagaactaagattccattatctaaggtacatggtctagatgtaaaaaatgtacagttagtagatgctatagataacatagtttgggaaaagaaatcattagtgacggaaaatcgtcttcacaaagaatgcttgttgagactatcgacagaggaacgtcatatatttttggattacaagaaatatggatcctctatccgactagaattagtcaatcttattcaagcaaaaacaaaaaactttacgatagactttaagctaaaatattttctaggatccggtgcccagtctaaaagttctttattacacgctattaatcatccaaagtcaaggcctaatacatctctggaaatagaattcacacctagagacaatgaaaaagttccatatgatgaactaataaaggaattgacgactctatcacgtcatatatttatggcttctccagagaatgtaattctttctccgcctattaacgcgcctataaaaacctttatgttgcctaaacaagatatagtaggtttggatctggaaaatctatatgccgtaactaagactgacggaattcctataactatcagagttacatcaaaagggttgtattgttattttacacatcttggttatattattagatatcctgttaagagaataatagattccgaagtagtagtctttggtgaggcagttaaggataagaactggaccgtatatctcattaagctaatagagcctgtgaatgcaatcaatgatagactagaagaaagtaagtatgttgaatctaaactagtggatatttgtgatcggatagtattcaagtcaaagaaatacgaaggtccgtttactacaactagtgaagtcgtcgatatgttatctacatatttaccaaagcaaccagaaggtgttattctgttctattcaaagggacctaaatctaacattgattttaaaattaaaaaggaaaatactatagaccaaactgcaaatgtagtatttaggtacatgtccagtgaaccaattatctttggagaatcgtctatctttgtagagtataagaaatttagcaacgataaaggctttcctaaagaatatggttctggtaagattgtgttatataacggcgttaattatctaaataatatctattgtttggaatatattaatacacataatgaagtgggtattaagtccgtggttgtacctattaagtttatagcagaattcttagttaatggagaaatacttaaacctagaattgataaaaccatgaaatatattaactcagaagattattatggaaatcaacataatatcatagtcgaacatttaagagatcaaagcatcaaaataggagatatctttaacgaggataaactatcggatgtgggacatcaatacgccaataatgataaatttagattaaatccagaagttagttattttacgaataaacgaactagaggaccgttgggaattttatcaaactacgtcaagactcttcttatttctatgtattgttccaaaacatttttagacgattccaacaaacgaaaggtattggcgattgattttggaaacggtgcggacctggaaaaatacttttatggagagattgcgttattggtagcgacggatccggatgctgatgctatagctagaggaaatgaaagatacaacaaattaaactctggaattaaaaccaagtactacaaatttgactacattcaggaaactattcgatccgatacatttgtctctagtgtcagagaagtattctattttggaaagtttaatatcatcgactggcagtttgctatccattattcttttcatccgagacattatgctaccgtcatgaataacttatccgaactaactgcttctggaggcaaggtattaatcactaccatggacggagacaaattatcaaaattaacagataaaaagacttttataattcataagaatttacctagtagcgaaaactatatgtctgtagaaaaaatagctgatgatagaatagtggtatataatccatcaacaatgtctactccaatgactgaatacattatcaaaaagaacgatatagtcagagtgtttaacgaatacggatttgttcttgtagataacgttgatttcgctacaattatagaacgaagtaaaaagtttattaatggcgcatctacaatggaagatagaccgtctacaaaaaactttttcgaactaaatagaggagccattaaatgtgaaggtttagatgtcgaagacttacttagttactatgttgtttatgtcttttctaagcggtaaataataatatggtatgggttctgatatccccgttctaaatgcattaaataattccaatagagcgatttttgttcctataggaccttccaactgtggatactctgtattgttaatagatatattaatacttttgtcgggtaacagaggttctacgtcttctaaaaataaaagtttgataacatctggcctgttcataaataaaaacttggcgattctatatatactcttattatcaaatctagccattgtcttatagatgtgagctactgtaggtgtaccatttgattttctttctaatactatatatttctctcgaagaagttcttgcacatcatctgggaataaaatactactgttgagtaaatcagttattttttttatatcgatattgatggacatttttatagttaaggataataagtatcccaaagtcgataacgacgataacgaagtatttatacttttaggaaatcacaatgactttatcagatcaaaattaacaaaattaaaggagcatgtatttttttctgaatatattgtgactccagatacatatggatctttatgcgtcgaattaaatgggtctagttttcagcacggtggtagatatatagaggtggaggaatttatagatgctggaagacaagttagatggtgttctacatccaatcatatatctgaagatatgcacactgataaatttgtcatttatgatatttatacgtttgattcgttcaagaataaacgattggtatttgtacaggtgcctccatcattaggagatgatagctatttgactaatccgttattgtctccgtattatcgtaattcagtagccagacaaatggtcaatgatatgatttttaatcaagattcatttttaaaatatttattagaacatctgattagaagccactatagagtttctaaacatataacaatagttagatacaaggataccgaagaattaaatctaacgagaatatgttataatagagataagtttaaggcgtttgtattcgcttggtttaacggcgtttcggaaaatgaaaaggtactagatacgtataaaaaggtatctaatttgatataatgaattcagtgactgtatcacacgcgccatatactattacttatcacgatgattgggaaccagtaatgagtcaattggtagagttttataacgaagtagccagttggctgctacgagacgagacgtcgcctattcctgataagttctttatacagttgaaacaaccgcttagaaataaacgagtatgtgtgtgtggtatagatccgtatccgaaagatggaactggtgtaccgttcgaatcaccaaattttacaaaaaaatcaattaaggagatagcttcatctatatctagattaaccggagtaattgattataaaggttataaccttaatataatagacggggttataccctggaattattacttaagttgtaaattaggagaaacaaaaagtcacgcgatctactgggataagatttccaagttactgctgcagcatataactaaacacgttagtgttctttattgtttgggtaaaacagatttctcgaatatacgggcaaagttagaatccccggtaactaccatagtcggatatcatccagcggctagagaccgccaattcgagaaagatagatcatttgaaattatcaacgttttactggaattagacaacaaggcacctataaattgggctcaagggtttatttattaatgctttagtgaaattttaacttgtgttctaaatggatgcaactattagaggtaatgatgttatctttgttcttaagactataggtgtcccgtcagcgtgcagacaaaatgaagatccaagatttgtagaagcatttaaatgcgacgagttagaaagatatattgagaataatccagaatgtacactattcgaaagtcttagggatgaggaagcatactctatagtcagaattttcatggatgtagatttagacgcgtgtctagacgaaatagattatttaacggctattcaagattttattatcgaggtgtcaaactgtgtagctagattcgcgtttacagaatgcggtgccattcatgaaaatgtaataaaatccatgagatctaatttttcattgactaagtctacaaatagagataaaacaagttttcatattatctttttagacacgtataccactatggatacattgatagctatgaaacgaacactattagaattaagtagatcatctgaaaatccactaaccagatcgatagacactgccgtatataggagaaaaacaactcttcgggttgtaggtactaggaaaaatccaaattgcgacactattcatgtaatgcaaccaccgcatgataatatagaagattacctattcacttacgtggatatgaacaacaatagttattacttttctctacaacgacgattggaggatttagttcctgataagttatgggaaccagggtttatttcattcgaagacgctataaaaagagtttcaaaaatattcattaattctataataaactttaatgatctcgatgaaaataattttacaacggtaccactggtcatagattacgtaacaccttgtgcattatgtaaaaaacgatcgcataaacatccgcatcaactatcgttggaaaatggtgctattagaatttacaaaactggtaatccacatagttgtaaagttaaaattgttccgttggatggtaataaactgtttaatattgcacaaagaattttagacactaactctgttttattaaccgaacgaggagaccatatagtttggattaataattcatggaaatttaacagcgaagaacccttgataacaaaactaattctgtcaataagacatcaactacctaaggaatattcaagcgaattactctgtccgaggaaacgaaagactgtagaagctaacatacgagacatgttaatagattcagtggagaccgatacctatccggataaacttccgtttaaaaatggtgtattggacctggtagacggaatgttttactctggagatgatgctaaaaaatatacgtgtactgtatcaaccggatttaaatttgacgatacaaagttcgtcgaagacagtccagaaatggaagagttaatgaatatcattaacgatatccaaccattaacggatgaaaataagaaaaatagagagttgtacgaaaaaactttatctagttgtttatgcggtgctaccaaaggatgtttaacattcttttttggagaaactgcaactggaaagtcgacaaccaaacgtttgttaaagtctgctatcggtgacctgtttgttgagacgggtcaaacaattttaacagatgtattggataaaggacctaatccatttatcgctaacatgcatttgaaaagatctgtattctgtagcgaactacctgattttgcctgtagtggatcaaagaaaattagatctgacaatattaaaaagttgacagaaccttgtgtcattggaagaccgtgtttctccaataaaattaataatagaaaccatgcgacaatcattatcgatactaattacaaacctgtctttgataggatagataacgcattaatgagaagaattgccgtcgtgcgattcagaacacacttttctcaaccttctggtagagaggctgctgaaaataatgacgcgtacgataaagtcaaactattagacgaggggttagatggtaaaatacaaaataatagatatagattcgcatttctatacttgttggtgaaatggtacaaaaaatatcatgttcctattatgaaactatatcctacaccggaagagattccggactttgcattctatctcaaaataggtactctgttagtatctagctctgtaaagcatattccattaatgacggacctctccaaaaagggatatatattgtacgataatgtggttactcttccgttgactactttccaacagaaaatatccaagtattttaattctagactatttggacacgatatagagagcttcatcaatagacataagaaatttgccaatgttagtgatgaatatctgcaatatatattcatagaggatatttcatctccgtaaatatatgctcatatatttatagaagatatcacatatctaaatgaataccggaatcatagatttatttgataatcatgttgatagtataccaactatattacctcatcagttagctactctagattatctagttagaactatcatagatgagaacagaagcgtgttattgttccatattatgggatcaggtaaaacaataatcgctttgttgttcgccttggtagcttccagatttaaaaaggtttacattctagtgcctaatattaacattttgaaaatttttaattataatatgggtgtagctatgaacttgtttaatgacgaattcatagctgagaatatctttattcattccacaacaagtttttattctcttaattataacgataacgtcattaattataacggattatctcgctacaataactctatttttatcgttgatgaggcacataatatctttgggaataatactggagaacttatgaccgtgataaaaaataaaaacaagattccttttttactattgtctggatctcccattactaacacacctaatactctgggtcatattatagatttaatgtccgaagagacgatagattttggtgaaattattagtcgtggtaagaaagtaattcagacacttcttaacgaacgaggtgtgaatgtacttaaggatttgcttaaaggaagaatatcatattacgaaatgcctgataaagatctaccaacgataagatatcacggacgtaagtttctagatactagagtagtatattgtcacatgtctaaacttcaagagagagattatatgattactagacgacagctatgttatcatgaaatgtttgataaaaatatgtataacgtgtcaatggcagtattgggacaacttaatctgatgaataatttagatactttatttcaggaacaggataaggaattgtacccaaatctgaaaataaataatggcgtgttatacggagaagaattggtaacgttaaacattagttccaaatttaaatactttattaatcggatacagacactcaacggaaaacattttatatacttttctaattctacatatggcggattggtaattaaatatatcatgctcagtaatggatattctgaatataatggttctcagggaactaatccacatatgataaacggcaaaccaaaaacatttgctatcgttactagtaaaatgaaatcgtctttagaggatctattagatgtgtataattctcctgaaaacgatgatggcagtcaattgatgtttttgttttcgtcaaacattatgtccgaatcctatactctgaaagaggtaaggcatatttggtttatgactatcccagatactttttctcaatacaaccaaattcttggacgatctattagaaaattctcttacgccgatatttctgaaccagttaatgtatatcttttagccgccgtatattccgatttcaatgacgaagtgacgtcattaaacgattacacacaggatgaattaattaatgttttaccatttgacatcaaaaagctgttgtatctaaaatttaagactaaagaaacgaatagaatatactctattcttcaagagatgtctgaaacgtattctcttccaccacatccatcaattgtaaaagttttattgggagaattggtcagacaatttttttataataattctcgtattaagtataacgataccaagttacttaaaatggttacatcagttataaaaaataaagaagacgctaggaattacatagatgatattgtaaacggtcacttctttgtatcgaataaagtatttgataaatctcttttatacaaatacgaaaacgatattattacagtaccgtttagactttcctacgaaccatttgtttggggagttaactttcgtaaagaatataacgtggtatcttctccataaaactgatgagatatataaagaaataaatgtcgagctttgttaccaatggataccttccagttacattggagccacacgagctgacgttagacataaaaactaatattaggaatgccgtatataagacgtatctccatagagaaattagtggtaaaatggccaagaaaatagaaattcgtgaagacgtggaattacctctcggcgaaatagttaataattctgtagttataaacgttccgtgtgtaataacctacgcgtattatcacgttggggatatagtcagaggaacattaaacatcgaagatgaatcaaatgtaactattcaatgtggagatttaatctgtaaactaagtagagattcgggtactgtatcatttagcgattcaaagtactgcttttttcgaaatggtaatgcgtatgacaatggcagcgaagtcactgccgttctaatggaggctcaacaaggtatcgaatctagttttgtttttctcgcgaatatcgttgactcataaaaaagagaatagcggtaagtataaacacgaatactatggcaataattgcgaatgttttattcccttcgatatatttttgataatatgaaaaacatgtctctctcaaatcggacaaccatctcataaaatagttctcgcgcgctggagaggtagttgctgctcgtataatctccccagaataatatacttgcgtgtcgtcgttcaatttatacggatttctatagttctctgttatataatgcggttttccatcatgattagacgacgacaatagtgttctaaatttagatagttgatcagaatgaatgtttattggcgttggaaaaattatccatacagcgtctgcagagtggttgatagttgttcctagatatgtaaaataatccaacttactaggcagcaaattgtctagataaaatactgaatcaaacggtgcagacgtattggtggatctaatggaatccaattgattaactatcttttgaaaatatacatttttatgatccgatacttgtaagaatatagaaataatgataagtccatcatcgtgtttttttgcctcttcataagaactatattttttcttattccaatgaacaagattaatctctccagagtatttgtacacatctatcaagtgattggatccataatcgtcttcctttccccaatatatacgtagtgatgataacacatattcattggggagaaaccctccacttatatatcctcctttaaaattaatccttactagttttccagtgttctggatagtggttggtttcgactcattataatgtatgtctaacggcttcaatcgcgcgttagaaattgcttttttagtttctatattaataggagatagttgttgcggcatagtaaaaatgaaatgataactgtttaaaaatagctcttagtatgggaattacaatggatgaggaagtgatatttgaaactcctagagaattaatatctattaaacgaataaaagatattccaagatcaaaagacacgcatgtgtttgctgcgtgtataacaagtgacggatatccgttaataggagctagaagaacttcattcgcattccaagcgatattatctcaacaaaattcagattctatctttagagtatccactaaactattacggtttatgtactacaatgaactaagagaaatctttagacggttgagaaaaggttctatcaacgatatcgatcctcactttgaagagttaatattattgggtggtaaactagataaaaaggaatctattaaagattgtttaagaagagaattaaaagaggaaagtgatgaacgtataacagtaaaagaatttggaaatgtaattctaaaacttacaacacgggataaattatttaataaagtatatataagttattgcatggcgtgttttattaatcaatcgttggaggatttatcgcatactagtatttacaatgtagaaattagaaagattaaatcattaaatgattgtattaacgacgataaatacgaatatctgtcttatatttataatatgctagttaatagtaaatgaacttttacagatctagtataattagtcagattattaagtataatagacgactagctaagtctattatttgcgaggatgactctcaaattattacactcacggcattcgttaaccaatgcctatggtgtcataaacgagtatccgtgtccgctattttattaactactgataacaaaatattagtatgtaacagacgagatagttttctctattctgaaataattagaactagaaacatgtctagaaagaaacgattatttctgaattattccaattatttgtccaaacaggaaagaagtatactatcgtcatttttttctctagatccagctactactgataatgatagaatagatgctatttatccgggtggcatacccaaaaggggtgagaatgttccagagtgtttatccagggaaattaaagaagaagttaatatagacaattcttttgtattcatagacactcggttttttattcatggcatcatagaagataccattattaataaattttttgaggtaatcttctttgtcggaagaatatctttaacgagtgatcaaatcattgatacatttaaaagtaatcatgaaatcaaggatctaatatttttagatccgaattcaggtaatggactccaatacgaaattgcaaaatatgctctagatactgcaaaactcaaatgttatggccatagaggatgttattacgaatcattaaaaaaattaactgaggatgattgattagaaaatataaattaatttaccatcgtgtatttttataacgggattgtccggcatatcatgtagatagttaccgtctacatcgtatactcgaccatctacgcctttaaatcctctatttattgacattaatctattagaattggaataccaaatattagtaccctcaattagtttattggtaatattttttttagacgatagatcgatggctcttgaaaccaaggttttccaaccggactcattgtcgatcggtgagaagtctttttcattagcatgaatccattctaatgatgtatgtttaaacactctaaacaattggacaaattcttttgatttgctttgaatgatttcaaataggtcttcgtctacagtaggcataccattagataatctagccattataaagtgcacgtttacatatctacgttctggaggagtaagaacgtgactattgagacgaatggctcttcctactatctgacgaagagacgcctcgttccatgtcatatctaaaatgaagatatcattaattgagaaaaaactaataccctcgcctccactagaagagaatacgcatgttttaatgcattctccgttagtgtttgattcttggttaaactcagccaccgccttgattctagtatcttttgttctagatgagaactctatattagagataccaaagactttgaaatatagtaataagatttctattcctgactgattaacaaatggttcaaagactagacatttaccatgggatgctaatattcccaaacatacatctataaatttgacgcttttctcttttaattcagtaaatagagagatatcagccgcactagcatcccctttcaatagttctccctttttaaaggtatctaatgcggatttagaaaactctctatctcttaatgaatttttaaaatcattatatagtgttgctatctcttgcgcgtattcgcccggatcacgattttgtctttcaggaaagctatcgaacgtaaacgtagtagccatacgtctcagaattctaaatgatgatatacctgtttttatttcagcgagtttagccttttgataaatttcttcttgctttttcgacatattaacgtatcgcattaatactgttttcttagcgaatgatgcagacccttctacgtcatcaaaaatagaaaactcgttattaactatgtacgaacataggcctcctagtttggagactaattctttctcatcaactagacgtttattctcaaatagcgattggtgttgtaaggatcctggtcgtagtaagttaaccaacatggtgaattcttgcacactattaacgataggtgtagccgataaacaaatcatcttatggttttttaatgcgatggtcttagataaaaaattatatactgaacgagtaggacggatcttaccatcttctttgattaatgatttagaaatgaagttatgacattcatcaataatgacgcatattctactcttggaattaatagttttgatattagtaaaaaatttatttctaaaattttgatcatcgtaattaataaaaatacaatccttcgttatctctggagcgtatctgagtatagtgttcatccaaggatcttctatcaaagcctttttcaccaataagataatagcccaattcgtataaatatccttaagatgtttgagaatatatacagtagtcattgttttaccaacacccgtttcatggaacaataaaagagaatgcatactgtctaatcctaagaaaactcttgctacaaaatgttgataatccttgaggcgtactacgtctgttcccatcatttcaacaggcatattagtagttctgcgcaatgcataatcgatataggccgcgtgtgatttactcatttatgagtgataagtaataactatgttttaaaaatcacagcagtagtttaactagtcttctctgatgtttgttttcgatactttttgaatcagaagtcatactagaataaagcaacgagtgaacgtaatagagagcttcgtatactctattcgaaaactctaagaacttattaatgaattccgtatccactggattgtttaaaatactaaattgaacactgttcacatccttccaagaagaagacttagtgacggacttaacatgagacataaataaatccaaattttttttacaaacatcactagccaccataatggcgctatctttcaaccagctatcgcttacgcattttagcagtctaacatttttaaagagactacaatatattctcatagtatcgattacacctctaccgaataaagttggaagtttaataatacaatatttttcgtttacaaaatcaaataatggtcgaaacacgtcgaaggttaacatcttataatcgctaatgtatagattgttttcagtgagatgattattagatttaatagcatctcgttcacgtttgaacagtttattgtgtgcgctgaggtcggcaactacggcgtccgctttagtactcctcccataatactttacgctattaatctttaaaatttcatagactttatctagatcgctttctggtaacatgatatcatgtgtaaaaagttttaacatgtcggtcggcattctatttagatcattaactctagaaatctgaagaaagtaattagctccgtattccagactaggtaatgggcttttacctaaagacaagttaagttctggcaatgtttcataaaatggaagaaggacatgcgttccctcccggatattttttacaatttcatccatttacaactctatagtttgttttcattattattagttattatctcccataatcttggtaatacttaccccttgatcgtaagataccttatacaggtcattacatacaactaccaattgtttttgtacataatagattggatggttgacatccatggtggaataaactactcgaacagatagtttatctttccccctagatacattggccgtaatagttgtcggcctaaagaatatctttggtgtaaagttaaaagttagggttcttgttccattattgctttttgtcagtagttcattataaattctcgagatgggtccgttctctgaatatagaacatcatttccaaatctaacttctagtctagaaataatatcggtcttattcttaaaatctattcccttgatgaagggatcgttaatgaacaaatccttggcctttgattcggctgatctattatctccgttatagacgttacgttgactagtccaaagacttacaggaatagatgtatcgatgatgttgatactatgtgatatgtgagcaaagattgttctcttagtggcatcactatatgttccagtaatggcggaaaactttttagaaatgttatatataaaagaattttttcgtgttccaaacattagcagattagtatgaagataaacactcatattatcaggaacattatcaatttttacatacacatcagcatcttgaatagaaacgataccatcttctggaacctcaacaatctcggcagactccggataaccagtcggtgggccatcactaacaataactagatcatccaacaatctactcacatatgcatctatataatctttttcatcttgtgagtaccctggatacgaaataaatttattatccgtatttccataataaggtttagtataaacagagagcgatgttgccgcatgaacttcagttacagtcgccgttggttggtttatttgacctattactctcctaggtttctctataaacgatggtttaatttgtacattcttaaccatatatccaataaagctcaattcaggaacataaacaaattctttgttgaacgtttcaaagtcgaacgaagagtcacgaataacgatatcggatactggattgaaggttaccgttacggtaatttttgaatcggatagtttaagactgctgaatgtatcttccacatcaaacggagttttaatataaacgtatactgtagatggttctttaatagtgtcattaggagttaggccaatagaaatatcattaagttcactagaatatccagagtgtttcaaagcaattgtattattgatacaattattatataattcttcgccctcaatttcccaaataacaccgttacacgaagagatagatacgtgattaatacatttatatccaacatatggtacgtaaccgaatcttcccatacctttaacttctggaagttccaaactcagaaccaaatgattaagcgcagtaatatactgatccctaatttcgaagctagcgatagcctgattgtctggaccatcgtttgtcataactccggatagagaaatatattgcggcatatacaaagttggaatttgactatcgactgcgaagacattagaccgtttaatagagtcatccccaccgatcaaagaattaatgatagtattattcattttctatttaaaatggaaaaagcttacaataaactccgtagagaaatatctataatttgtgagttttccttaaagtaacagcttccgtaaacgccgtctttatctcttagtaggtttattgtatttatgaccttttccttatcttcatagaatactaaaggcaacaaagaaatttttggttcttctctaagagctacgtgagacttaaccatagaagccaacgaatccctacatattttagaacagaaatacccaacttcaccacccttgaatgtctcaatactaataggtctaaaaaccaaatcttgattacaaaaccaacacttatcaattacactatttgtcttaatagacacatctgccatagatttataatactttggtagtatacaagcgagtgcttcttctttagcgggcttaaagactgctttaggtgctgaaataaccacatctggaaggcttactcgcttagccatttaattacggaactatttttttatacttctaatgagcaagtagaaaacctctcatctacaaaaacatactcgtgtccataatcctctaccatagttacacgttttttagatctcatatgtgctaaaaagttttcccatactaattggttactattatttttcgtataatttttaacagtttgaggttttagatttttagttacagaagtgatatcgaatattttatccaaaaagaatgaataattaattgtcttagaaggagtgttttcttggcaaaagaataccaagtgcttaaatatttctactacttcattaatcttttctgtactcagattcagtttctcatcttttacttgattgattatttcaaagactaacttataatcctttttatttattctctcgttagccttaagaaaactagatacaaaatttgcatctacatcatccgtggatatttgatttttttccatgatatccaagagttccgagataatttctccagaacattgatgagacaataatctccgcaatacatttctcaaatgaataagtttattagacacatggaagtttgactttttttgtacctttgtacatttttgaaatacagactcgcaaaaaatacaatattcatatccttgttcagatactataccgttgtgtctacaaccgctacataatcgtagattcatgttaacactctacgtatctcgtcgtccaatattttatataaaaacattttatttctagacgttgccagaaaatcctgtaatatttttagttttttgggctgtgaataaagtatcgccctaatatggttaccgtcctccgccaatatagtagttaaattatccgcacatgcagaagaacaccgcttaggcggattcagtacaatgttatatttttcgtaccaactcatttaaatatcataatctaaaatagttctgtaatatgtctagcgctaatatattgatcataatcctgtgcataaattaagatacaacaatgtctcgaaatcatcgacatggcttcttccatagttagaagatcgtcgtcaaagttagcaacgtgattcatcaacatttgctgttttgaggcagcaaatactgaaccgtcgccattcaaccattcataaaaaccatcgtctgaatccattgataatttcttgtactggtttttgagagctcgcatcaatctagcatttctagctcccggattgaaaacagaaagaggatcgtacatccagggtccattttctgtaaatagaatcgtataatgtcccttcaagaagatatcagacgatccacaatcaaagaattggtctccgagtttgtaacaaactgcggactttaacctatacatgataccgtttagcatgatttctggtgatacgtcaatcggagtatcatctattagagatctaaagccggtgtaacattctccaccaaacatattcttattctgacgtcgttctacataaaacatcattgctccattaacgataacaggggaatgaacagcactacccatcacattagttcccaatggatcaatgtgtgtaactccagaacatcttccatatcctatgttaggaggagcgaacaccactcttccactattgccatcgaatgccatagaataaatatccttggaattgatagaaatcggactgtcggatgttgtgatcatcttcataggattaacaactatgtatggtgccgcctgaagtttcatatcgtaactgatgccgtttataggtctagccacagaaaccaacgtaggtctaaatccaactatagacaaaatagaagccaatatctgttcttcatctgtcataacttgagagcatccagtatgaataatcttcattagatggggatctaccgcatcatcatcgttacaataaaaaattcccattctaatgttcataattgcttttctaatcatggtatgcatgtttgctctctgaatctctgtggaaattagatctgatacacctgtaatcactatcggattatcctccgtaagacgattaaccaacaacatataattataagactttacttttctaaattcataaagttgctggattaggctataggtgtctccatgtacatacgcgttctcgagcgcaggaagtttaataccgaatagtgccatcagaataggatgaatatagtaattagtttctggttttctataaataaaagacaaatcttgtgaactagacatatcggtaaaatgcatggattggaatcgtgtagtcgacagaagaatatgatgattagatggagagtatattttatctaactctttgagttggtcaccgattctaggactagctcgagaatgaataagtactaaaggatgagtacatttcacagaaacactagcattgttcaatgtgctctttacatgggtaaggagttgaaatagctcgtttctatttgttctgacaatatttagtttattcataatgttaagcatatcctgaatagtaaagttagatgtgtcatacttgttagtagttagatatttagcaattgcattcccatcatttctcaatctcgtactccaatcatgcgtggatgctacttcgtcgatggaaaccatacaatcctttttgataggctgttgagattgattatttcctgcacgtttaggtttggtacgttgatttctagcccctgcggatataaagtcatcgtctacaattttggataatgaattgcatacactacaagacaaagatttatcagaagtgtgaatatgatcttcatctaccaaagaaagagtttgattagtataactagattttagtcctgcgttagatgttaaaaaaacatcgctattgaccacggcttccattatttatattcgtagtttttactcgaaagcgtgattttaatattcaatcttattacttttggaatcgttcaaaacctttgactaattgtagaatttgatctattgccctacgcgtatactcccttgcatcatatacgttcgtcaccagatcgtttgtttcggcctgaagttggtgcatatctctttcaacattcgacatgagatccttaagggccatatcgtctagattttgttgagatgctgctcctggatttggattttgttgtgctgttgtacatactgtaccaccagtaggtgtaggagtacatacagtggccacaataggaggttgaggaggtgtaaccgttggagtagtacaagaaatacttccatccgattgttgtgtacatgtagttgttggtaacgtctgagaaggttgggtagatggcggcgtcgtcgtcttttgatctttattaaatttagagataatatcctgaacagcattgctcggcgtcaacgctggaaggagtgaactcgccggcgcatcagtatctgcagacagccaatcaaaaagattagacatatcagatgatgtattagtttgttgtcgtggttttggtgtaggagccggtgtagctgttggaaccggctgtggagttatatgaatagttggttgtagcggttggataggctgtctgctggcggccatcatattatctctagctagttgttctcgcaactgtctttgataatacgactcttgagactttagtcctatttcaatcgcttcatcctttttcgtatccggatccttttcttcagaataatagattgacgactttggtgtagaggattctgccagcccctgtgagaacttgttaaagaagtccatttaaggctttaaaattgaattgcgattataagattaaatggcagacacagacgatattatcgactatgaatccgatgatctcaccgaatacgaggatgatgaagaagaggaagaagatggagagtcactagaaactagtgatatagatcccaaatcttcttataagattgtagaatcagcatccactcatatagaagatgcgcattccaatcttaaacatatagggaatcatatatctgctcttaaacgacgctatactagacgtataagtctatttgaaatagcgggtataatagcagaaagctataacttgcttcaacgaggaagattacctctagtttcagaattttctgacgaaacgatgaagcaaaatatgctacatgtaattatacaagagatagaggagggttcttgtcctatagtcatcgaaaagaacggagaattgttgtcggtaaacgattttgacaaagatggtctaaaattccatctagactatattatcaaaatttggaaacttcaaaaacgatattagaatttatacgaatatcgttctctaaatgtcacaatcaagtctcgcatgttcagcaatttattgtcgtactttatatcgtgttcattaacgatatcttgcaaaatagtaatgattctatcttccttcgatagatattcttcagagattattgtcttatattctttcttgttatcagatatgaatttgataagactttgaacattattgatacccgtctgtttaattttttctacagatattttagttttggcagattctatcgtatctgtcaatagacatccaacatcgacattcgacgtcaattgtctataaatcaacgtataaattttagaaataacattagcgaattgttgtgcattgatgtcgttattctgaaacagtatgattttaggtagcattttcttaacaaagagaacgtatttattgttactcagttgaacagatgatatatccagattactaacgcatctgattccatataccaaactttcagaagaaatggtgtacaattgtttgtattcattcaatgtctctttttcagaaattagtttagagtcgaatactgcaataattttcaagagatagttttcatcagataagattttatttagtgtagatatgataaaactattgttttgttggagaacttgatacgccgcgttctctgtagtcgacgctctcaaatgggaaacaatctccattatttttttggaatcggatacaatatcttcggtatcttgacgcaatctagtatacatagagttaagagaaattagagtttgtacattaagcaacatgtctctaaatgtggctgcaaacttttccttttccacatcatctagtttattatataccgatttcacaacggcaccagatttaaggaaccagaatgaaaaactctgataactacaatatttcatcatagttacgattttatcatcttctatagttggtgtaatagcgcatacctttttctccaagactggaaccaacgtcataaaaatgtttaaatcaaaatccatatcaacatctgatgcgctaagaccagtctcgcgttcaagattatctttactaatggtgacgaactcatcgtatagaactctaagtttgtccattatttatttacagatttagttgtttaatttatttgtgctcttccagagttgggatagtatttttctaacgtcggtattatattattaggatctacgttcatatgtatcataatattaatcatccacgttttgataaatctatctttagcttctgaaataacgtatttaaacaaaggagaaaaatatttagctacggcatcagacgcaataacattttttgtaaatgtaacgtatttagacgacagatcttcgttaaaaagttttccatctatgtagaatccatcggttgttaacaccattcccgcgtcagattgaataggagtttgaatagtttgttttggaaatagatccttcaataacttatagttgggtgggaaaaaatcgattttatcactagactctttcttttttactatcattacctcatgaactatttcttgaatgagtatatgtattttctttcctatatcggacgcgttcattggaaaatataccatgtcgttaactataagaatatttttatcctcgtttacaaactgaataatatcagatgtagttcgtaaacgaactatatcatcaccagcacaacatctaactatatgatatccactagtttcctttagtcgtttattatcttgttccatattagcagtcattccatcatttaagaaggcgtcaaagataatagggagaaatgacattttggattctgttacaactttaccaaaattaaggatatacggacttactatctttttctcaacgtcgatttgatgaacacacgatgaaaatgtacttcgatgagattgatcatgtagaaaacaacaagggatacaatatttccacatatcatgaaatatattaagaaatcccaccttattatatttccccaaaggatccatgcatgtaaacattatgccgttatcattaataaagacttctttctcatcggatctgtaaaagttgttactgatttttttcattccaggatctagataattaataatgatgggttttctattcttattctttgtattttggcatatcctagaccagtaaacagtttccactttggtaaaatcagcagacttttgaacgctattaaacatggcattaatggcaataactaaaaatgtaaaatatttttctatgttaggaatatggtttttcactttaatagatatatggtttttggccaaaatgatagatatttttttatccgaggatagtaaaatattattagtcgccgtctctataaaaatgaagctagtctcgatatccaattttattctagaattgataggagtcgccaaatgtaccttatacgttatatctcccttgatgcgttccatttgtgtatctatatcggacacaagatctgtaaatagttttacgttattaatcatcacggtatcgccgtcgctagataacgctaatgtaccatccaagtcccaaatggagagatttaactgttcatcgtttagaataaaatgattaccggtcatattaataaagtgttcatcgtatctagataacaacgacttataattaatgtccaagtcttgaactcgctgaatgatcttttttaacccagttagttttagattggtacgaaatatattgttaaactttgattctacagtaatgtccaaatctagttgtggaaatacttccatcaacattgtttcaaacttgataatattattatctacatcttcatacgatccaaattccggaatagatgtatcgcacgctctggccacccagataaccaaaaagtcacacgctccaggatatacattgtataaaaagctatcgttttttagtagtgtttttttctgagtatatacgaagggattaaaaatagtattatcaacgtaactatattccaaattattcttatgagaatagataataatatcgtccttaatatctaacaaatttcctaaatatccctttaattgagtcattcgaagcgtcaatagaatatgtctcttaactatttccggctgttgtatatttaaatgacttcgtaaaaaataatatatgggcgacttctcatctatgtaatcatatggagtgagatatagggctcgttctacctcctgccccttacccacctgtaataccaattgcggacttactatatatcgcatatttatatcgtggggtaaagtgaaaatctactaccgatgatgtaagtcttacaatgttcgaaccagtaccagatcttaatttggaggcctccgtagaactaggggaggtaaatatagatcaaacaacacctatgataaaggaaaatagcggttttatatcccgtagtagacgtctattcgcccatagatctaaggatgatgagagaaaactagcactacgattctttttacaaagactttattttttagatcatagagagattcattatttgttcagatgcgttgacgctgtaaaagacgtcactattaccaaaaaaaataacattatcgtggcgccttatatagcacttttaactatcgcatcaaaaggatgcaaacttacagaaacaatgattgaagcattctttccagaactatataatgaacatagtaagaaatttaaattcaactctcaagtatccatcatccaagaaaaactcggataccagtttggaaactatcacgtttatgattttgaaccgtattactctacagtagctctggctattcgagatgaacattcatctggcatttttaatatccgtcaagagagttatctggtaagttcattatctgaaataacatatagattttatctaattaatctaaaatctgatcttgttcaatggagtgctagtacgggcgctgtaattaatcaaatggtaaatactgtattgattacagtgtatgaaaagttacaactggtcatagaaaatgattcacaatttacatgttcattggctgtggaatcaaaacttccaataaaattacttaaagatagaaatgaattatttacaaaattcatcaacgagttaaaaaagaccagttcattcaagataagcaaacgcgataaggatacgctactaaaatattttacttaggactggagttagaatttatagacgactcatttcgtttatcattattagtattcttcttgttatcttgttcagaaatatacagcaatgctatgcctaatactaaatacattatcatgcttgcaatggctctaacaacgacgaaccaaaatgaatttggtcgtagcttttgttcacaaaaatacataaagaaatgtctacataaatctatggcgccattggctacttgaaatagcgccagtcctcctacagattttaatatagctgtataacatgacatttattcatcatcaaaagagacagagtcaccatctgtcatatttagattttttttcatgtgttcaaagtatcctctactcatttcattataatagtttatcatacttagaattttaggacggatcaatgagtaagacttgactagatcgtcagtagtaatttgtgcatcgtctattctgcatccgcttcgtcgaataatgtatagcatcgctttgagattctccatagctatcaagtctttatacaatgacatggaaatatctgtgaatactttatacttctccaacatcgatgccttaacatcatcgcctactttagcattgaaaatacgttctattgtgtagatggatgtagcaagatttttaaacaacaatgccattttacacgatgattgcctcaagtctccaatcgtttgtttagaacgattagctacagagtccaatgcttggctgactagcatattattatctttagaaattgtattcttcaatgaggcgtttatcatatctgtgatttcgttagtcatattacagtctgactgggttgtaatgttatccaacatatcacctatggatacggtacacgtaccagcatttgtaataatcctatctaagatgttgtatggcattgcgcagaaaatatcttctcctgtaatatttccactctcgataaatctactcagattattcttaaatgccttattctctggagaaaagatatcagtgtccatcatttcattaatagtatacgcagaaaagataccacgagtatcaattctatccaagatacttatcggttccgagtcacagataatggtttcctctccttcgggagatcctgcatagaaatatctaggacaatagtttctatactgtctgtaactctgataatctctaaagtcactaactgataccatgaaattgagaagatcaaacgctgaagtaattaatttttctgcctcgtttttactacaactagttttcatcaatgtagtgacgatgtattgtttagttactcttggtctaatactgatgatagagatattattacttcccataatggatcttctagtagtcaccttaaagcccattgatgcaaatagcagatagataaagtcttggtatgactcctttctaatatagtacggactacctttgtcacccaactttatacccacataagccataacaacctctttaatagccgtttcatgaggtttatcagccatgagcctgagtagttggaagaatctcatgaatcctgtctcagaaagtcctatatgcatgatagatttatctttcctgggaaactctcgtatagtcatagatgaaatactcttcaaagtttctgaaataagattagtaacagtcttacctccgactactctaggtaacaaacaaactctaataggtgttttctctgcggagataatatcagaaaggatagagcaataagtagtattattgtgattataaagaccgaatacataacaggtagaatttataaacatcatgtcctgaaggtttttagacttgtattcctcgtaatccataccgtcccaaaacatggatttggtaactttgatagccgtagatctttgttccttcgccaacaggttaaagaaattaataaagaatttgtggtttctacctatgtctacaaattgcacgtttggaagcgccacggttacattcactgcagcattttgaggatcgcgagtatgaagtacgatgttattgtttactggtatatctggaaagaattctaccagtctaggaataagagattgatatcgcatagaaatacaaaagttcataatctcatcatctaagagcattttgttaccattgtaataaatatccactctgtcatatgtataaatgaagtactgttcaaacatgatgagatgtttatatgttggcatagtagtgagatctacgtttggtaatggcaatgtattaagattaactccataatgtctagcagcatctgcgatgttataagcgttgtcaaagcggggtcgatcttgtgctgttatatattgtctaacacctataagattatcaaaatcttgtctgcttaatacaccgttaacaatttttgccttgaattcttttattggtgcattaataacatccttatagaggatgttaaacaaataagtgttatcaaagttaagatctggatatttcttttctgctagaacatccattgagtcggagccatctggtttaatataaccaccgataaatctagctctgtattctgtatccgtcaatctaatattaagaaggtgttgagtgaaaggtggaagatcgtaaaagctgtgagtattaatgataggattagtttccgaactaatgttaattggggtattaataatatctatatttccagcgttaagtgtaacattaaacagttttaattcacgtgacgtggtatcaattaaataattaatgcccaatttggatatagcagcctgaagctcatcttgtttagttacggatcctaatgagttattaagcaatatatcgaacggatgaacgaaggttgttttaagttggtcacatactttgtaatctagacatagatgcggaagaacggtagaaactatacgaaataaatattcagagtcctctaattgatcaagagtaactattgacttaataggcatcatttatttagtattaaatgacgaccgtaccagtgacggatatacaaaacgatttaattacagagttttcagaagataattatccatctaacaaaaattatgaaataactcttcgtcaaatgtctattctaactcacgttaacaacgtggtagatagagaacataatgccgccgtagtgtcatctccagaggaaatatcctcacaacttaatgaagatctatttccagatgatgattctccggccactattatcgaacgagtacaacctcatactactattattgacgatactccacctcctacgtttcgtagagagttattgatatcggaacaacgtcaacaacgagaaaaaagatttaatattacagtatcgaaaaatgctgaagcaataatggaatctagatctatgatatcttctatgccaacacaaacaccatccttgggagtagtttatgataaagataaaagaattcagatgttggaggatgaagtggttaatcttagaaatcaacgatctaatacaaaatcatctgataatttagataattttaccagaatactatttggtaagactccgtataaatcaacagaagttaataagcgtatagccatcgttaattatgcaaatttgaacgggtctcccttatcagtcgaggacttggatgtttgttcagaggatgaaatagatagaatctataaaacgattaaacaatatcacgaaagtagaaaacgaaaaattatcgtcactaacgtgattattattgtcataaatattatcgagcaagcattgctaaaactcggatttgaagaaatcaaaggactgagtaccgatatcacttcagaaattatcgatgtggagatcggagatgactgcgatgctgtagcatcaaaactaggaatcggtaacagtccggttcttaatattgtattgtttatactcaagatattcgttaaacgaattaaaattatttaatttaatacattcccatatccagacaacaatcgtctggattaatctgttcctgtcgtctcataccggacgacatattaatctttttattagtaggcatctttttagatggtttctttttcccagcattaactgagtcgatacctagaagatcgtgattgatctctccgaccattccacgaacttctaattggccgtctctgacggtaccataaactattttaccagcattagtaacagcttggacaatctgaccatccatcgcattgtacgatgtagtagtaactgttgttctacgtctaggagcaccagaagtatttttggagcccttggatgttgatgtagaagaagacgaggattttgattttggtttacatgtaatacattttgtatcacatgcgccggcagtcacatctgtttgagaattaagattattgttgcctcctttgacggctgcatctccaccgatttgcgctagtagatttttaagctgtggtgtaatcttattaactgtttcgatataatcatcgtaactgcttctaacggctaaattttttttatccgccatttagaagctaaaaatatttttatttatgcagaagatttaactagattatacaatgaactaatatgatccttttccagattatttacaaacttggtattttttggttctggaggaggcgaatttaaattcggacttggatttggattttgtgggttcttgatcttattatacagcgcatataggatggcgacggtaactgctacgcaaataccgatcaacaaaagaataccaatcatttattgacaataacttcactattgatcaagtatgcaatatatcatcttttcactaaataagtagtaataatgattcaacaatgtcgagatatatggacgataataatttagttcatggaaatatcgctatgattggtatgaatgactccgctaactctgtggggcgcgcagtgctttccccacatagaataaattagcattccgactgtgataataataccaagtataaacgccataatactcaatactttccatgtacgagtgggactggtagacttactaaagtcaataaaggcgaagatacacgaaagaatcaaaagaatgattccagcgattagcacgccggaaaaataatttccaatcataagcatcatatccatttaactaataaaaattttaaatcgccgaatgaacaaagtggaatataaaccatataaaaacaatagtttgtactgcaaaaataatatctatttttgttttcgaagatatggtaaaattaaatagtagtacacagcatgttataactaacagcagcaacggctcgtaattacttatcatttactagacgaaaaggtggtgggatattttcttgctcaaataatacgaatatatcacccatccattttatgcgatgtttatatactctaatctttaatagatctatagacgacgggtttaccaacaatatagattttatcgattcatctaatttaaacccttccttaaacgtgaatgatctattatctggcataacgatgactctacccgatgaatcggacaatgtactgggccatgtagaataaattatcaacgaattatcgtctacgaacatttatatcatttgttttaattttagtacgcgaataaatagatataaaatagaaaataacagatattacaaccaatgttatggccgcgcccaaccaggtaggcagttttattttatcttttactacaggttctcctggatgtacgtcaccaacggcggacgtagttctagtacaattagacgtaagttccgcttgggaattttttaacgctaaagagttaacgttaatcgtgcacccaacgtatttacatctagttctttgaacatcttgattataatataaccattttctatctctagattcgtcggtgcactcatgtaaccaacataccctaggtcctaaatatttatctccggaattagattttggataattcgcgcaccaacaatttctatttcctttatgatcgttacaaaagacgtataatgccgtatccccaaaagtaaaataatcaggacgaataattctaataaactcagaacaatatctcgcatccatatgtttggagcaaatatcggaataagtagacatagccggtttccgttttgcacgtaaccattctaaacaattggggtttccaggatcgtttctacaaaatccagtcatgaaatcatcacaatgttctgtcttgtaattattattaaatatttttggacagtgtttggtatttgtcttagaacaacattttgccacgctatcactatcgcccaggagataatccttttttataaaatgacatcgttgcccggatgctatataatcagtagcgtgttttaaatccttaatatattcaggagttacctcgttctgataatagattaatgatccaggacgaaatttgaaagaactacatggttctccatgaattaatacatattgtttagcaaattcaggaactataaaactactacaatgatctatcgacataccatctatcaaacaaaacttgggtttaatttctcccggagatgtttcataatagtacgtataactttcttctgcaaacttaacagctctattatattcaggataattaaaacctaattccatatatttgtctcgtatatctgctattcctggtgctattttgattctattaagagtaacggctgcccccatttttaataatcgtcagtatttaaactgttaaatgttggtatatcaacatttaccttatttcccgcagtataaggtttgttgcaggtatactgttcaggaatggttacatttatactttttctatagtcctgtctttcgatgttcatcacatatgcaaagaacagaataaacaaaataatgtaagaaataatattaaatatctgtgaattcgtaaatacattgattgccataataattacagcagctacaatacatacaatagacattcccacagtgttgccattacctccacgatacatttgagttactaagcaataggtaataactaagctagtaagaggcaatagaaaagatgagataaatatcatcaatatagagattagaggagggctatatagagccaagacgaacaaaatcaaaccgagtaacgttctaacatcattatttttgaagattcccaaataatcattcattcctccataatcgttttgcatcatacctccatctttaggcataaacgattgctgctgttcctctgtaaataaatctttatcaagcactccagcacccgcagagaagtcgtcaagcatattgtaatatcttaaataactcatttatatattaaaaaatgtcactattaaagatggagtataatctttatgccgaactaaaaaaaatgacttgtggtcaacccctaagtctttttaacgaagacggggatttcgtagaagttgaaccgggatcatcctttaagtttctgatacctaagggattttacgcctctccttccgtaaagacgagtctagtatttgaaacattaacaacgaccgataataaaattactagtatcaatccaacaaatgcgccaaagttatatcctcttcaacgcaaagtcgtatctgaagtagtttctaatatgaggaaaatgatcgaatcaaaacgtcctctatacatcactcttcacttggcgtgtggatttggtaagactattaccacgtgttatcttatggctacacacggtagaaaaaccgtcatttgcgtacccaataaaatgttaatacatcaatggaagacacaggtagaggcagtcggattggaacataagatatccatagatggagtaagtagtctattaaaggaactaaagactcaaagtccggatgtattaatagtagtcagtagacatctgacaaacgatgccttttgtaaatatatcaataagcattatgatttgttcatcttggatgaatcacatacgtataatctgatgaacaatacagcagttacaagatttttagcgtattatcctccgatgatgtgttattttttaactgctacacctagaccatctaacagaatttattgtaacagtattattaatattgccaagttatccgatctaaaaaaaactatctatgcagtagatagtttttttgagccatattccacagataatattagacatatgataaaacgattagatggaccatctaataaatatcatatatataccgagaagttattatctgtagacgagcctagaaatcaacttattcttaataccctggtagaagaattcaagtcaggaactattaatcgcattttagttattactaaactacgtgaacatatggtattcttctacaaacgattattagattttttcggatcagaggttgtatttataggagacgcccaaaatagacgtactccagatatggtcaaatcaatcaaggaactaaatagatttatattcgtatccaccttattttattccggtactggtttagatattcctagtttggattctttgttcatttgctcggcagtaatcaacaatatgcaaatagagcaattactagggagggtatgtcgagaaacagaactattagataggacggtatatgtatttcctagcacatccatcaaagaaataaagtacatgataggaaatttcgttcaacgaattattagtctgtctgtagataaactaggatttaaacaaaaaagttatcggaaacatcaagaatccgatcccacttctgtatgtacaacatcctccagagaagaacgtgtattaaatagaatatttaactcgcaaaatcgttaagaagtttaagcgacgatccgcatgctgcgcaggccagtgtattacccctcatagtattaatataatccaatgatacttttgtgatgtcggaaatcttaaccaatttagactgacaggcagaacacgtcatgcaatcatcatcgtcatcgataactgtagtcttgggcttctttttgcggctcttcattccggaacgcacattggtgctatccatttaggtagtaaaaaataagtcagaatatgccctatagcacgatcgtgcaaaacctggtatatcgtctctatctttatcacaatatagtgtatcgacatctttattattattgacctcgtttatcttggaacatggaatgggaacatttttgttatcaacggccacctttgccttaattccagatgttgtaaaattataactaaacagtctatcatcgacacaaatgaaattcttgtttagacgtttgtagtttacgtatgcggctcgttcgcgtctcattttttcagatattgcaggtactataatattaaaaataagaatgaaataacataggattaaaaataaagttatcatgacttctagcgctgatttaactaacttaaaagaattacttagtctgtacaaaagtttgaaattttcagattctgcggctatagaaaagtataattctttggtagaatggggaacatctacttactggaaaataggcgtgcaaaaggtagctaatgtcgagacgtcaatatctgattattatgatgaggtaaaaaataaaccgtttaatattgatccgggctattacattttcttaccggtatattttgggagcgtctttatttattcgaagggtaaaaatatggtagaacttggatctggaaactcttttcaaataccagatgatatgcgaagtgcgtgtaacaaagtattagacagcgataacggaatagactttctgagatttgttttgttaaacaatagatggataatggaagatgctatatcaaaatatcagtctccagttaatatatttaaactagctagtgagtacggattaaacatacccaaatatttagaaattgaaatagaggaagacacattatttgacgacgagttatactctattatagaacgctctttcgatgataaatttccaaaaatatccatatcgtatattaagttgggagaacttaggcggcaagttgtagactttttcaaattctcattcatgtatattgagtccatcaaggtagatcgtataggagataatatttttattcctagcgttataacaaaatcaggaaaaaagatattagtaaaagatgtagaccatttaatacgatccaaggttagagaacatacatttgtaaaagtaaaaaagaaaaacacattttccattttatacgactatgatggaaacggaacagaaactagaggagaagtaataaaacgaattatagacactataggacgagactattatgttaacggaaagtatttctctaaggttggtagtgcaggcttaaagcaattgactaataaattagatattaatgagtgcgcaactgtcgatgagttagttgatgagattaataaatccggaactgtaaaacgaaaaataaaaaaccaatcagcatttgatttaagcagagaatgtttgggatatccagaagcggattttataacgttagttaataacatgcggttcaaaatagaaaattgtaaggttgtaaatttcaatattgaaaatactaattgtttaaataacccgagtattgagactatatatggaaactttaaccagttcgtctcaatctttaatatcgtcaccgatgtcaaaaaaagattattcgagtgaaataatatgcgcctttgatataggtgcaaaaaatcctgccagaactgttttagaagtcaaggataactccgttagggtattggatatatcaaaattagactggagttctgattgggaaaggcacatagctaaagatttgtcacaatatgaatacactacagttcttctagaacgtcagcctagaaggtcgccgtacgtcaaatttatctattttattaaaggctttttatatcatacatcggctgccaaagttatttgcgtctcgcctgtcatgtctggtaattcatatagagatcgaaaaaagagatcggtcgaagcatttcttgattggatggacacattcggattgcgagactccgttccggatagacgcaaattagacgatgtagcggatagtttcaatttggctatgagatacgtattagataaatggaatactaattatacaccttataataggtgtaaatctagaaattacataaaaaaaatgtaataacgttagtaacgccattatggataatctatttacctttctacatgaaatagaagatagatatgccagaactatttttaactttcatctaataagttgcgatgaaataggagatatatatggtcttatgaaagaacgcatttcctcagaggatatgtttgataatatagtgtataataaagatatacatcatgccattaagaaactagtgtattgcgacatccaacttactaaacacattattaatcagaatacgtatccggtatttaacgattcttcacaagtgaaatgttgtcattatttcgatataaactcagataatagcaatattagctctcgtacagtagagatatttgagagggaaaagtcatctcttgtatcatatattaaaactaccaataagaagagaaaggtcaattatggggaaataaagaaaactgtacatggaggcactaatgcaaattacttttccggtaaaaagtctgatgagtatctgagcactacagtcaggtccaacattaatcaaccttggatcaaaaccatttctaagagaatgagagtagatatcattaatcactctatagtaacgcgtggaaaaagctctatattacaaactatagaaattatttttactaatagaacatgtgtgaaaatattcaaggattctactatgcacattattctatccaaggacaaggatgaaaaggggtgtatacacatgattgacaaattattctatgtctattataatttatttctgttgttcgaggatatcatccaaaacgagtactttaaagaagtagctaatgttgtaaaccacgtactcacggctacggcattagatgagaaattattcctaattaagaaaatggctgaacacgatgtttatggagttagcaatttcaaaatagggatgtttaacctgacatttattaagtcgttggatcataccgttttcccctctctgttagatgaggatagcaaaataaagttttttaaggggaaaaagctcaatattgtagcattacgatctctggaggattgtataaattacgtgactaaatccgagaatatgatagaaatgatgaaggaaagatcgactattttaaatagcatagatatagaaacggaatcggtagatcgtctaaaagaattgcttctaaaatgaaaaaaaaacactaattcagaaatggatcaacgactcggatataagtttttggtgcctgatcctaaagccggagttttttatagaccgttacatttccaatatgtatcgtattctaattttatattgcatcgattgcatgaaatcttgaccgtcaagcggccactcttatcgtttaagaataatacagaacgaattatgatagaaattagcaatgttaaagtgactcctccagattactcacctataatcgcgagtattaaaggtaagagttatgacgcattagccacgttcactgtaaatatctttaaagaggtaatgaccaaagagggtatatccatcactaaaataagtagttatgagggaaaagattctcatttgataaaaattccgctactaataggatacgggaataaaaatccacttgatacagccaagtatcttgttcctaatgtcataggtggagtctttatcaataaacaatctgtcgaaaaagtaggaattaatctagtagaaaagattacaacatggccaaaatttagggttgttaagccaaactcattcactttctcgttttcctccgtatcccctcctaatgtattaccgacaagatatcgccattacaagatatctctggatatatcacaattggaagcgttgaatatatcatcgacaaagacatttataacggtcaatattgttttgctgtctcaatatttatctagagtgagtctagaattcattagacgtagtttatcatacgatatgcctccagaagttgtctatctagtaaacgcgataatagatagtgctaaacgaattactgaatctattactgactttaatattgatacatacattaatgacctggtggaagctgaacacattaaacaaaaatctcagttaacgatcaacgagttcaaatatgaaatgctgcataactttttacctcatatgaactatacacccgatcaactaaagggattttatatgatatctttactaagaaagtttctctactgtatctaccacacttctagatatccagatagagattcgatggtttgtcatcgcatcctaacgtacggcaaatattttgagacgttggcacatgatgaattagagaattacataggcaacatccgaaacgatatcatgaacaatcacaagaacagaggcacttacgcggtaaacattcatgtactaacaactcctggacttaatcatgcattttctagtctattgagtggaaagttcaaaaagtcagacggtagttatcgaacacatcctcactattcatggatgcagaatatttctattcctaggagtgttggattttatccggatcaagtaaagatttcaaagatgttttctgtcagaaaataccatccaagtcaatatctttacttttgttcatcggacgttccggaaagaggtcctcaggtaggtttagtatctcaattgtctgtcttgagttccattacaaatatactaacgtctgagtatttggatttggaaaagaaaatttgtgagtatatcagatcatattataaagatgatataagttactttgaaacaggatttccaatcactatagaaaatgctctagtcgcatctcttaatccaaatatgatatgtgattttgtaactgactttagacgtagaaaacggatgggattcttcggtaacttggaggtaggtattactttagttagggatcacatgaatgaaattcgcattaatattggagcgggaagattagtcagaccattcttggttgtggataacggagagctcatgatggatgtgtgtccggagttagaaagcagattagacgacatgacattctctgacattcagaaagagtttccgcatgtcatcgaaatggtagatatagaacaatttacttttagtaacgtatgtgaatcggttcaaaaatttagaatgatgtcaaaggatgaaagaaagcaatacgatttatgtgactttcctgccgaatttagagatggatatgtagcatcttcactagtgggaatcaatcacaattctggacccagagctattcttggatgtgctcaagctaaacaagctatctcttgtctgagctcggatatacgaaataaaatagacaatggaattcatttgatgtatccagagaggccaatcgtgattagtaaggctttagaaacttcaaagattgcggctaattgcttcggccaacatgttactatagcattaatgtcgtacaaaggtatcaatcaagaggatggaattatcatcaaaaaacaatttattcagagaggcggtctcgatattgttacagccaagaaacatcaagtagaaattccgttggaaaactttaataacaaagaaagagataggtctaacgcctattcaaaattagaaagtaatggattagttagactgaatgctttcttggaatccggagacgctatagcacgaaatatctcatcaagaactcttgaagatgattttgctagagataatcagattagctttgatgtttccgaaaaatataccgatatgtacaaatctcgcgttgaacgagtacaagtagaacttactgacaaagttaaggtacgagtattaaccatgaaagaaagaagacccattctaggagacaaatttaccactagaacgagtcaaaagggaacagtcgcgtatatcgcggatgaaacggaacttccatacgatgaaaatggtatcacaccagatgtcattattaattctacatccatcttctctagaaaaactatatctatgttgatagaggttattttaacagccgcatattctgctaagccgtacaacaataagggagaaaaccgacctgtctgttttcctagtagtaacgaaacatccatcgatacatatatgcaattcgctaaacaatgttatgagcattcaaatccgaaattgtctgatgaagaattatcggataaaatcttttgtgaaaagattctctatgatcctgaaacggataagccttatgcatccaaagtattttttggaccaatttattacttgcgtctgaggcatttaactcaggacaaggcaaccgttagatgtagaggtaaaaagacgaagctcattagacaggcgaatgagggacgaaaacgtggaggaggtatcaagttcggagaaatggagagagactgtttaatagcgcatggtgcagccaatactattacagaagttttgaaagattcggaagaagattatcaagatgtgtatgtttgtgaaaattgtggagacatagcagcacaaatcaagggtattaatacatgtcttagatgttcaaaacttaatctctctcctctcttaacaaaaattgataccacgcacgtatctaaagtatttcttactcaaatgaacgccagaggcgtaaaagttaaattagatttcgaacgaaggcctccttcgttttataaaccattagataaagttgatctcaaaccgtcttttctggtgtaatattctagtttggtagtagatacatatcaatatcatcaaattcgagatccgaattataaaatgggcgtggattgttaactatagaatcggacgtctgatattcgaaaatctgtggagttttaggttttggtggaggtgtaactgctacttgggatactgaagtctgatattcagaaagctgggggatgttctggttcgacatccaccgatggtgtcacatcactaatcggttcggtaacgtctgtggacgatggaggcaccacttctacaggttctggttctttatcctcagtcatcaacggagctacttcaatgcgaggaaatgtataatttggtaatggtttctcatgtggatctgaagaagaggtaagatatctactagaaagataccgatcacgttctagttctcttttgtagaacttaactttttctttctccgcatctagttgatattccaacctcttcacgttcgcatgggttacctccgcagtttttacgagcgatttcacgttcagccttcatgcgtcttatagcatgaattcgcttatcgttatcgggtttagcttctgtcaccttagcaattccttttttattaaactctacataatcatatccatttctattgtttgttctaatataaacgagtatagcatcattgctaaatttttcaatagtatcgaaaacagaatatcctaaaccatataatatatattcaggaacactcaaactaaatgtccaggattctcctaaatacgtaaactttaatagtgcgaaatcattcaaaaatctaccacttatagatagatagatagtacataaatgcgtatagtagtctacctatctctttattatgaaaaccggcattacgatcatatatgtcgtgatatacctgtgatccgtttacgttaaaccataaatacatgggtgatcctataaacatgaatttatttctaattctcagagctatagttaattgaccgtgtaatatttgcttacatgcatacttgatacgatcattaataagatttttatcattgctcgttatttcagaatcgtatatataaggagtaccatcgtgattcttaccagatattatacaaaatactatatataaaatatattgacccacgttagtaatcatgtaaatgtttaacgttttaaattttgtattcaatgatccattatcatacgctagcatggtcttatgatattcattctttaaaatataatattgtgttagccattgcattggggctcctaatggagattttttattctcatccattttaggataggctttcataaagtccctaataacttcgtgaataatgtttctatgttttctactgatgcatgtatttgcttcgatttttttatcccatgtttcatctatcatagatttaaacgcagtaatgctcgcaacattaacatcttgaaccgttggtacaattccgttccataaatttataatgttcgccatttatataactcattttttgaatatacttttaattaacaaaagagttaagttactcatatggacgccgtccagtctgaacatcaatctttttagccagagatatcatagccgctcttagagtttcagcgtgattttccaacctaaatagaacttcatcgttgcgtttacaacacttttctatttgttcaaactttgttgttacattagtaatctttttttccaaattagttagccgttgtttgagagtttcctcattgtcgtcttcatcggctttaacaattgcttcgcgtttagcctctggctttttagcagccgttgtagaaaaaaattcagttgctggaattgcaagatcgtcatctccggggaaaagagttccgtccatttaaagtacagattttagaaactgacactctgcgttatttatatttggtacaacacatggattataaatattgatgttaataacatcagaaaatgtaaagtctatacattgttgcatcgtgttaaattttctaatggatctagtattattgggtccaacttctgcctgaaatccaaatatggaagcggatacaaaaccgtttcctggataaaccacacatctccacttttgctttacatcagaaattgtgtcgttgacatcttgaactctcctatctaatgccggtgttccacctatagattttgaatattcgaatgctgcatgagtagcattaaattccttaatattgccataattttcatatattgagtaaccctggataaaaagtaaacacaccgcagccgtagctaccacaataaaaaaaattgatagagagttcatttataatctattagaagctgacaaaatttttttacacgcatcagacaatgctttaataaatagttcaacatctacttttgtcatatcgaaccgatggtatgattctaacctagaattacatccgaaaaagttgactatgttcatagtcattaagtcattaacaaacaacattccagactctggattataagacgatactgtttcgtcacaattacctaccttaatcatgtgattatgaatattggctattagagcaccttctaagaaatctataatatctttgaaacacgatttaaaatcaaaccacgaatatacttctacgaagaaagttagtttacccataggagaaataactataaatggagatctaaatacaaaatccggatctatgatagttttaacattattatattctctattaaatacctccacatctaaaaatgttaattttgaaactatgtcttcgtttattaccgtacctgaactaaacgctataagctctattgtttgagaactctttaaacgatattcttgaaatacatgtaacaaagtttcctttaactcggtcggtttatctaccatagttacagaatttgtatccttatctataatataataatcaaaatcgtataaagttatataattatcgcgttcagattgggatcttttcaaatagactaaaaaccccatttctctagtaagtatcttatgtatatgtttgtaaaatatcttcatggtgggaatatgctctaccgcagttagccattcctcattgacagcggtagatgtattagacaaaactattccaatgtttaacaagggccattttacgagattattaaatccttgtttgataaatgtagccaatgagggttcgagttcaacgacgattgaattctcttcccgcggatgctgcatgatgaacgacgggatgttgttcgattgatttggaattctttttcgactttttgtttatattaaatattttaaaatttatagcggatagcaattcatgtaccacggataatgtagacgcgtattgcgcatcgatatctttattattagataaatttatcaataaatgtgagaagtttgcctcgttaaggtcttccatttaaatattatataaacatttgtgtttgtatcttattcgtcttttatggaatagttttttactagtaaagctgcaattacacactttgtccgtaaaacataaatataaacaccagcttttatcaatcgttccaaaaagtcgacggcggacatttttaacatggcatctattttaaatacacttaggtttttggaaaaaacatcattttataattgtaacgattcaataactaaagaaaagattaagattaaacataagggaatgtcatttgtattttataagccaaagcattctaccgttgttaaatacttgtctggaggaggtatatatcatgatgatttggttgtattggggaaggtaacaattaatgatctaaagatgatgctattttacatggatttatcatatcatggagtgacaagtagtggaacaatttacaaattgggatcgtctatcgatagactttctctaaataggactattgttacaaaagttaataattataattatgatacattttttgacgatgatgattgatcgctattgcacaattttgtttttttactttctaatatagcgtttagattctttttcatgtgcgaatattgatttactaaaatatctatgtttaacttttgttctataacgtccttatcggcggtatcggtacatatacgtaattcaccttcacaaaatacggagtcttcgataataatagccaatcgattattggatctagctgtctgtatcatattcaacatgtttaatatatcctttcgtttcccctttacaggcatcgatcgtagcatattttccgcgtctgagatggaaatgttaaaactacaaaaatgcgtaatgttagcccgtcctaatattggtacgtgtctataagtttggcatagtagaataatagacgtgtttaaatgccttccaaagtttaagaattctattagagtattgcattttgatagtttatcgcctacatcatcaaaaataagtaaaaagtgtgctgattttttatgattttgtgcgacagcaatacatttttctatgttacttttagttcgtatcagattatattctagagattcctgactactaacgaaattaatatgatttggccaaatgtatccatcataatctggattataaacgggtgtaaacaagaatacatgtttatattttttaactagtgtagaaaacagagatagtaaatagatagtttttccagatccagatcctcccgttaaaaccattctaaacggcatttttaataaattttctcttgaaaattgtttttcttggaaacaattcataattatatttacagttactaaattaatttgataataaatcaaaatatggaaaactaaggtcgttagtagggaggagaacaaagaaggcacatcgtgacataaataacatttattatcatgatgacaccagaaaacgacgaagagcagacatctgtgttctccgctactgtttacagagacaaaattcagggaaagaataaacgcaaacgcgtgattggtctatgtattagaatatctatggttatttcactactatctatgattaccatgtccgcgtttctcatagtgcgcctaaatcaatgcatgtctgctaacgaggctgctattactgacgccgctgttgccgttgctgctgcatcatctactcatagaaaggttgcgtctagcactacgcaatatgatcacaaagaaagctgtaatggtttatattaccagggttcttgttatatattacattcagactaccagttattctcggatgctaaagcaaattgcactgcggaatcatcaacactacccaataaatccgatgtcttgactacctggctcattgattatgttaaggatacatggggatctgatggtaatccaattacaaaaactacatccgattatcaagattctgatgtatcacaagaagttagaaagtatttttgtgttaaaacaatgaactaatatttatttttgtacattaataaatgaaatcgcttaatagacaaactgtaagtaggtttaagaagttgtcggtgccggtcgctataatgatgatactctcaaccattattagtggcataggaacatttctgcattacaaagaagaactgatgcctagtgcttgcgccaatggatggatacaatacgataaacattgttatttagatactaacattaaaatgtctacagataatgcggtttatcagtgtcgtaaattacgagccagattgcctagaccggatactagacatctgagagtattgtttagtattttttataaagattattgggtaagtttaaaaaagaccaatgataaatggttagatattaataatgataaagatatagatattagtaaattaacaaattttaaacaactaaacagtacgacggatgctgaagcgtgttatatatacaagtctggaaaactggttaaaacagtatgtaaaagtactcaatctgtactatgtgttaaaaaattctacaagtgacaacaaaaaatgaattaataataagtcgttaacgtacgccgccatggacgccgcgtttgttattactccaatgggtgtgttgactataacagatacattgtatgatgatctcgatatctcaatcatggactttataggaccatacattataggtaacataaaaactgtccaaatagatgtacgggatataaaatattccgacatgcaaaaatgctactttagctataagggtaaaatagttcctcaggattctaatgatttggctagattcaacatttatagcatttgtgccgcatacagatcaaaaaataccatcatcatagcatgcgactatgatatcatgttagatatagaagataaacatcagccattttatctattcccatctattgatgtttttaacgctacaatcatagaagcgtataacctgtatacagctggagattatcatctaatcatcaatccttcagataatctgaaaatgaaattgtcgtttaattcttcattctgcatatcagacggcaatggatggatcataattgatgggaaatgcaatagtaattttttatcataaaagttgtaaagtaaataataaaacaataaatattgaactagtagtacgtatattgagcaatcagaaatgatgctggtacctcttatcacggtgaccgtagttgcgggaacaatattagtatgttatatattatatatttgtaggaaaaagatacgtactgtctataatgacaataaaattatcatgacaaaattaaaaaagataaagagttctaattccagcaaatctagtaaatcaactgatagcgaatcagactgggaggatcactgtagtgctatggaacaaaacaatgacgtagataatatttctaggaatgagatattggacgatgatagcttcgctggtagtttaatatgggataacgaatccaatgttatggcgcctagcacagaacacatttacgatagtgttgctggaagcacgctgctaataaataatgatcgtaatgaacagactatttatcagaacactacagtagtacttaatgaagataccaaacagaatcctaactattcatccaatcctttcgtaaattataataaaaccagtatttgtagcaagtcaaatccgttcattacagaactcaacaataaatttagtgagaataatccgtttagacgagcacatagcgatgattatcttaataagcaagaacaagatcatgaacacgatgatatagaatcattggtgtgattagtttcctttttataaaattgaagtaatatttagtattattgctgccgtcacgttgtacaaatggagatattccctgtattcggcatttctaaaattagcaattttattgctaataatgactgtagatattatatagatacagaacatcaaaaaattatatctgatgagatcaatagacagatggatgaaacggtacttcttaccaacatcttaagcgtagaagttgtaaatgacaatgagatgtaccatcttattcctcatagattatcgacgattatactctgtattagttctgtcggaggatgtgttatctctatagataatgacgtcaatggcaaaaatattctaacctttcccattgatcatgctgtaatcatatccccactgagtaaatgtgtcgtagttagcaagggtcctacaaccatattggttgttaaagcggatatacctagcaaacgattggtaacatcgtttacaaacgacatactgtatgtaaacaatctatcactgattaattattcgccgttgtctgtattcattattagacgagttaccgactatttggatagacacatatgcgatcagatatttgcgaataataagtggtattccattataaccatcgacaataagcagtttcctattccatcaaactgtataggtatgtcctctgccaagtacataaattctagcatcgagcaagatactttaatacatgtttgtaacctcgagcatccattcgacttagtatacaaaaaaatgcagtcgtacaattctgtacctatcaaggaacaaatattgtacggtagaattgataatataaatatgagcattagtatttctgtggattaatagatttctagtatggggatcattaatcatctctaatctctaaatacctcataaaacgaaaaaaaagctattatcaaatactgtacggaatggattcattctcttctctttttatgaaactctgttgtatatctactgataaaactggaagcaaaaaatctgataaaaagaataagaataagatcaaggattattataaaataacaatagttcctggttcctcttccacgtctactagctcgtggtattatacacatgcctagtaatagtctctttgcgttgacggaaagcagactagaaataacaggctaaaatgttcagacaccataatagttcccaacccagataataacagagtaccatcaacacattcctttaaactcaatcccaaacccaaaaccgttaaaatgtatccggccaattgatagtagataatgaggtgtacagcgcatgatgatttacacagtaaccaaaatgaaaatactttagtaattataagaaatatagatggtaacgtcatcatcaacaatccaataatatgccggagagtaaacattgacggataaaacaaaaatgctccgcataactctatcatggcaataacacaaccaaatacttgtaagattcctaaattagtagaaaatacaacggatatcgatgtataagtgatctcgagaaataataagaataaagtaatgcccgtaaagataaacatcaacattgtttggtaatcattaaaccaattagtatgaagttgaactaatttcacagtagattttattccagtattatccccgcatgtataagtacctggtaagatatctttatattccataatcaatgagacatcactatctgataacgaatgaagtctagcactagtatgccatttacttaatattgtcgtcttggaagttttattataagttaaaatatcatggttatccaatttccatctaatatactttgtcggattatctatagtacacggaataatgatggtatcattacatgctgtatactctatggtctttgtagttgttataacaaccaacgtatagaggtatatcaacgatattctaactcttgacattttttatttatttaaaatgatacctttgttatttattttattctattttgctaacggtattgaatggcataagtttgaaacgagtgaagaaataatttctacttacttattagacgacgtattatacacgggtgttaatggggcggtatacacattttcaaataataaactaaacaaaactggtttaactaataataattatataacaacatctataaaagtagaggatgcggaaccaataacggaaatcccaaatgttggaaaatagacggttcagacgacccaaaacatagaggtagaggatacgctccttatcaaaatagcaaagtaacgataatcagtcacaacggatgtgtactatctgacataaacatatcaaaagaaggaattaaacgatggagaagatttgacggaccatgtggttatgatttatacacggcggataacgtaattccaaaagatggtttacgaggagcattcgtcgataaagatggtacttatgacaaagtttacattcttttcactgatactatcggctcaaagagaattgtcaaaattccgtatatagcacaaatgtgcctaaacgacgaaggtggtccatcatcattgtctagtcatagatggtcgacgtttctcaaagtcgaattagaatgtgatatcgacggaagaagttatagacaaattattcattctagaactataaaaacagataatgatacgatactatatgtattcttcgatagtccttattccaagtccgcattatgtacctattctatgaataccattaaacaatctttttctacgtcaaaattggaaggatatacaaagcaattgccgtctccagctcctggtatatgtttaccagctggaaaagttgttccacataccacgtttgaagtcatagaaaaatataatgtactagatgatattataaagcctttatctaaccaacctatcttcgaaggaccgtctggtgttaaatggttcgatataaaggagaaggaaaatgaacatcgggaatatagaatatacttcataaaagaaaattctatatattcgttcgatacaaaatctaaacaaactcgtagctcgcaagtcgatgcgcgactattttcagtaatggtaacttcgaaaccgttatttatagcagatatagggataggagtaggaatgccacaaatgaaaaaaatacttaaaatgtaatcttaatcgagtacaccgcacgacaatgaacaaacataagacagattatgctggttatgcttgctgcgtaatatgcggtctaattgttggaattatttttacagcgacactattaaaagttgtagaacgtaaattagttcatacaccatcaatagataaaacgataaaagatgcatatattagagaagattgtcctactgactggataagctataataataaatgtatccatttatctactgatcgaaaaacctgggaggaaggacgtaatgcatgcaaagctctaaatccaaattcggatctaattaagatagagactccaaacgagttaagttttttaagaagcattagacgcggatattgggtaggagaatccgaaatattaaaccagacaaccccatataattttatagctaaaaatgccacgaagaatggaactaaaaaacggaaatatatttgtagtacaacgaatactcccaaactacatttttatcataccactacttcggttagatgttttagaaaaaaataaatatcgccgtaccgttcttgtttttataaaaataacaattaacaattatcaaattttttctttaatattttacgtggttgaccattcttggtggtaaaataatctcttagtgttggaatggaatgctgtttaatgtttccgcactcatcgtatattttgacgtatgcagtcacatcgtttacgcaatagtcagactgtagttctatcatgcttcctacatcagaaggaggaacagttttaaagtctcttggttttaatctattgccattagttttcatgaaatcctttgttttatccacttcacattttaaataaatgtccactatacattcttctgttaattttactagatcgtcatgggtcatagaatttataggttccgtagtccatggatccaaactagcaaacttcgcgtatacggtatcgcgattagtgtatacaccaactgtatgaaaattaagaaaacagtttaataaatcaacagaaatatttaatcctccgtttgatacagatgcgccatatttatggatttcggattcacacgttgtttgtctgaggtgttcgtctagtgttgcttctacgtaaacttcgattcccatatattctttattgtcagaatcgcataccgatttatcatcatacactgtttgaaaactaaatggtatacacatcaaaataataaataataacgagtacattctgcaatattgttatcgtaattggaaaaatagtgttcgagtgagttggattatgtgagtattggattgtatattttattttatattttatattttgtagtaagaatagaatgctaatgtcaagtttattccaatagatgtcttattaaaaaacatatataataaataacaatggctgaatggcataaaattatcgaggatatctcaaaaaataataagttcgaggatgccgccatcgttgattacaagactacaaagaatgttctagctgctattcctaacagaacatttgccaagattaatcctctcatcactaatcgtaatattctaaaacctcttattggtcagaaatattgtattgtatatactaactctctaatggatgagaacacgtatgctatggagttgcttactgggtacgcccctgtatctccgatcgttatagcgagaactcataccgcacttatatttttgatgggtaagccaacaacatccagacgtgacgtgtatagaacgtgtagagatcacgctacccgtgtacgtgcaactggtaattaaaataaaaagtaatattcatatgtagtgtcaattttaaatgatgatgatgaaatggataatatccatattgacgatgtcaataatgccggtattggcatacagttcatcgatttttagatttcattcagaggatgtggaattatgttatgggcatttgtattttgataggatctataatgtagtaaatataaaatataatccgcatattccatatagatataattttattaatcgcacgttaaccgtagatgaactagacgataatgtcttttttacacatggttattttttaaaacacaaatatggttcacttaatcctagtttgattgtctcattatcaggaaacttaaaatataatgatatacaatgctcagtaaatgtatcgtgtctcattaaaaatttggcaacgagtacatctactatattaacatctaaacataagacttattctctacatcggtccacgtgtattactataataggatacgattctattatatggtataaagatataaatgacatctatgattttactgcaatatgtatgctaatagcgtctacattgatagtgaccatatacgtgtttaaaaaaataaaaatgaactcttaattatgctatgctattagaaatggataaaatcaaaattacggttgattcaaaaattggtaatgttgttaccatatcgtataacttggaaaagataactattgatgtcacacctaaaaagaaaaaagaaaaggatgtattattagcgcaatcagttgctgtcgaagaggcaaaagatgtcaaggtagaagaaaaaaatattatcgatattgaagatgacgatgatatggatgtagaaagcgcataatacgatctataaaaataagtatataaatactttttatttactgtactcttactgtgtagtggtgataccctactcgattatttttttaaaaaaaaatacttattctgattcttctagccatttccgtgttcgttcgaatgccacatcgacgttaaagataggggagtagttgaaatctagttctgcattgttggtacgcacctcaaatgtagtgttggatatcttcaacgtatagttgttgagtagtgatggttttctaaatagaattctcttcatatcattcttgcacgcgtacatttttagcatccatcttggaatcctagatccttgttctattcccaatggtttcatcaatagaagattaaacatatcgtacgaacacgatggagagtaatcgtagcaaaagtaagcatttcctttaatctcagatcccggatactggatatattttgcagccaacacgtgcatccatgcagcatttcctacatatacccggctatgtaccgcgttatcatcgactgtacgatacataatgttaccgtgttgcttacattgctcgtaaaagactttcatcaatttgtctccttctccgtaaattccagtgggtcttaggcaacaagtatacaattttgctccattcatgattacggaattattggctttcataaccagttgctcggccatacgtttactttttgcgtatacatgtcctggtgatatatcataaagggtatgctcatggccgatgaatggatcaccgtgtttattgggtcctattgcttccatgctactagtatagatcaaatacttgattcctaggtccacacaagctgccaatatagtctgtgttccataatagtttactttcatgatttcattatcggtgtattttccaaatacatccactagagcagctgtatgaataatcagatttaccccatctagcgcttctcttaccttatcaaagtcgtttatatcacattgtatatagtttataaccttaactttcgaggttattggttgtggatcttctacaatatctatgactctgatttcttgaacatcatctgcactaattaacagttttactatatacctgcctagaaatccggcaccaccagtaaccgcgtacacggccattgctgccactcataatatcagactacttattctattttactaaataatggctgtttgtataatagaccacgataatatcagaggagttatttactttgaaccagtccatggaaaagataaagttattggattaaaatccggaacgtatagtttgataattcatcgttacggagatattagtcaaggatgtgattccataggcagtccagaaatatttatcggtaacatctttgtaaacagatatggtgtagcatatgtttatttagatacagatgtaaatatatctacaattattggaaaggcgttatctatttcaaaaaatgatcagagattagcgtgtggagttattggtatttcttacataaatgaaaagataatacattttcttacaattaacgagaatggcgtttgatatatcagttaatgcgtctaaaacaataaatgcattagtttacttttctactcagcaaaataaattagtcatacgtaatgaagttaatgatacacactacactgtcgaatttgatagggacaaagtagttgacacgtttatttcatataatagacataatgactccatagagataagaggggtgcttccagaggaaactaatattggttgcgcggttaatacgccggttagtatgacttacttgtataataagtatagttttaaactgattttagcagaatatataagacacagaaatactatatccggcaatatttattcggcattgatgacactagatgatttggctattaaacagtatggagacattgatctattatttaatgagaaacttaaagtagactccgattcgggactatttgactttgtcaactttgtaaaggatatgatatgttgtgattctagaatagtagtagctctatctagtctagtatctaaacattgggaattgacaaataaaaaatataggtgtatggcattagccgaacatatatctgatagtattccaatatctgagctatctagactacgatacaatctatgtaagtatctacgcgggcacactgagagcatagaggatgaatttgattattttgaagacgatgattcgtctacatgttctgccgtaaccgacagggaaacggatgtataattttttttatagcgtgaaggatatgataaaaaatataattgttgtatttatcccattccaatcaccttatatgattctgtaacacaatgaaggagtcttatagatgtatagaggtcagatactggtttgataaactgtttattccacataagtatgtttgactttatggttagacccgcatactttaacaaatcactgaaaattggagttaggtattgacctctcagaatcagttgccgttctggaacattaaatgtattttttatgatatactccaacgcatttatgtgggcatacaacaagtcattactaatggagtattccaagagaagagatttcaacagactgtttatgaactcgaatgccgcctcattgtcgcttatattgatgatgtcgaattctcccaatatcatcaccgatgagtagctcatcttgttatcgggatccaagttttctaaagatgtcattaaaccctcgatcatgaatggatttatcatcatcgtttttatgttggacatgagcttagtccgtttgtccacatctatagacgacgatttctgaattatttcatatatccctctctttaactccaggaacttgtcaggatggtctactttaatatgttctcgtctaagagatgaaaatctttggatggttgcacgcgacttttctctaaaggatcctctcttaaatgaatccatcttatccttggacaagatggacagtctattttccttagatggtttaatatttttgttacccatgatctataaaggtagacctaatcgtctcggatgaccatatatttattttcagttttattatacgcataaattgtaaaaaatatgttaggtttacaaaaatgtctcgtggggcattaatcgtttttgaaggattggacaaatctggaaaaacaacacaatgtatgaacatcatggaatctataccggcaaacacgataaaatatcttaactttcctcagagatccactgtcactggaaagatgatagatgactatctaactcgtaaaaaaacctataatgatcatatagttaatctattattttgtgcaaatagatgggagtttgcatcttttatacaagaacaactagaacagggaattactttaatagttgatagatacgcattctctggagtagcgtatgccgccgctaaaggcgcgtcaatgactctcagtaagagttatgaatctggattgcctaaacccgacttagttatattcttggaatctggtagcaaagaaattaatagaaacgtcggcgaggaaatttatgaagatgttacattccaacaaaaggtattacaagaatataaaaaaatgattgaagaaggagatattcattggcaaattatttcttctgaattcgaggaagatgtaaagaaggagttgattaagaatatagttatagaggctatacacacggttactggaccagtggggcaactgtggatgtaatagtgaaattacattttttataaatggatgaagcatattactctggcaacttggaatcagtactcggatacgtgtccgatatgcataccgaactcgcatcaatatctcaattagttattgccaagatagaaactatagataatgatatattaaacaaggacattgtaaattttatcatgtgtagatcaaacttggataatccatttatctctttcctagatactgtatatactattatagatcaagagatctatcagaccgaattgattaattcattagacgacaatgaaattatcgattgtatagttaacaagtttatgagcttttataaggataacctagaaaatatagtagatgctatcattactctaaaatatataatgaataatccagattttaaaactacgtatgccgaagtactcggttccagaatagcggatatagatattaaacaagtgatacgtgagaatatactacaattgtctaataatatccgcgaacgatatttgtgaaaatattaaaaaaaaatactttttttattaaatgacgtcgcttcgcgaatttagaaaattatgctgtgatatatatcacgcatcaggatataaagaaaaatctaaattaattagagactttataacagatagggatgataaatatttgatcattaagctattgcttcccggattagacgatagaatttataacatgaacgataaacaaattataaaattatatagtataatatttaaacaatctcaggaagatatgctacaagatttaggatacggatatataggagacactattaggactttcttcaaagagaacacagaaatccgtccacgagataaaagcattttaactttagaagaagtggatagttttttaactacgttatcatccgtaactaaagaatcgcatcaaataaaattattgactgatatcgcatccgtttgtacatgtaatgatttaaaatgtgtagtcatgcttattgataaagatctaaaaattaaagcgggccctcggtacgtacttaacgctattagtcctcatgcctatgatgtgtttagaaaatctaataacttgaaagagataatagaaaatgcatctaaacaaaatctagactctatatctatttctgttatgactccaattaatcccatgttagcggaatcgtgtgattctgtcaataaggcgtttaaaaaatttccatcaggaatgtttgcggaagtcaaatacgatggtgaaagagtacaagttcataaaaataataacgagtttgccttctttagtagaaacatgaaaccagtactctctcataaagtggattatctcaaagaatacataccgaaagcatttaaaaaagctacgtctatcgtattggattctgaaattgttcttgtagacgaacataatgtaccgctcccgtttggaagtttaggtatacacaaaaagaaagaatataaaaactctaacatgtgtttgttcgtgtttgactgtttgtactttgatggattcgatatgacggacattccattgtacgaacgaagatcttttctcaaagatgttatggttgaaatacccaatagaatagtattctcagagttgacgaatattagtaacgagtctcagttaactgacgtattggatgatgcactaacgagaaaattagaaggattggtcttaaaagatattaatggagtatacgaaccgggaaagagaagatggttaaaaataaagcgagactatttgaacgagggttccatggcagattctgccgatttagtagtactaggtgcttactatggtaaaggagcaaagggtggtatcatggcagtctttctaatgggttgttacgacgatgaatccggtaaatggaagacggttaccaagtgttcaggacacgatgataatacgttaagggagttgcaagaccaattaaagatgattaaaattaacaaggatcccaaaaaaattccagagtggttagtagttaataaaatctatattcccgattttgtagtagaggatccaaaacaatctcagatatgggaaatttcaggagcagagtttacatcttccaagtcccataccgcaaatggaatatccattagatttcctagatttactaggataagagaggataaaacgtggaaagaatctactcatctaaacgatttagtaaacttgactaaatcttaatagttacatacaaattaaaataacactatttagttggtggtcgccatggatggtgttattgtatactgtctaaacgcgttagtaaaacatggcgaggaaataaatcatataaaaaatgatttcatgattaaaccatgttgtgaaaaagtcaagaacgttcacattggcggacaatctaaaaacaatacagtgattgcagatttgccatatatggataatgcggtatccgatgtatgcaattcactgtataaaaagaatgtatcaagaatatccagatttgctaatttgataaagatagatgacgatgacaagactcctactggtgtatataattattttaaacctaaagatgccattcctgttattatatccataggaaaggatagagatgtttgtgaactattaatctcatctgataaagcgtgtgcgtgtatagagttaaattcatataaagtagccattcttcccatggatgtttccttttttaccaaaggaaatgcatcattgattattctcctgtttgatttctctatcgatgcggcacctctcttaagaagtgtaaccgataataatgttattatatctagacaccagcgtctacatgacgagcttccgagttccaattggttcaagttttacataagtataaagtccgactattgttctatattatatatggttgttgatggatctgtgatgcatgcaatagctgataatagaacttacgcaaatattagcaaaaatatattagacaatactacaattaacgatgagtgtagatgctgttattttgaaccacagattaggattcttgatagagatgagatgctcaatggatcatcgtgtgatatgaacagacattgtattatgatgaatttacctgatgtaggcgaatttggatctagtatgttggggaaatatgaacctgacatgattaagattgctctttcggtggctggtaaaaaattgaaaataaatacaaaggttcttgagggttgtgttaaattgaaagcgagaaataatcataaataagataaacgccgccaccatgtctgataacggaccacagaatcagcgaaacgcaccacgcattacgtttggtggaccctcagattcaactggcagtaaccagaatggagaacgcagtggagcgcgatctaaacaacgtcggcctcaaggtttacccaataatactgcgtcttggttcaccgctctcactcaacatggcaaggaagaccttaaattccctcgaggacaaggcgttccaattaacaccaatagcagtccagatgaccaaattggctactaccgaagagctaccagacgaattcgtggtggtgacggtaagatgaaagatctcagtccaagatggtatttctactacctaggaactgggccagaagctggacttccctatggtgctaacaaagacggcatcatatgggttgcaactgagggagccttgaatacacctaaagatcacattggcacccgcaatcctgctaacaatgctgcaatcgtgctacaacttcctcaaggaacaacattgcctaaaggcttctacgcagaagggagcagaggcggcagtcaagcctcttctcgttcctcatcacgtagtcgcaacagttcaagaaattcaactccaggcagcagtagaggaacttctcctgctagaatggctggcaatggcggtgatgctgctcttgctttgctgctgcttgacagattgaaccagcttgagagcaagatgtctggtaaaggccaacaacaacaaggccaaactgtcactaagaaatctgctgctgaggcttctaagaagcctcggcagaaacgtactgccactaaagcatacaatgtaacacaagctttcggcagacgtggtccagaacaaacccaaggaaactttggagaccaggaactaatcagacaaggaactgattacaaacattggccgcaaattgcacaatttgctcccagcgcttcagcgttcttcggaatgtcgcgcattggcatggaagtcacaccttcgggaacgtggttgacctacacaggtgccatcaaattggatgacaaagatccaaatttcaaagatcaagtcatattgctgaataagcatattgacgcatacaagacattcccaccaacagagcctaagaaggacaagaagaagaaggctgatgaaactcaagccttaccgcagagacagaagaaacagcaaactgtgactcttcttcctgctgcagatttggatgatttctccaaacaattgcaacaatccatgagcagtgctgactcaactcaggcctaaggcgcgcctttttatactagtatttggaaagttttataggtagttgatagaacaaaatacataattttgtaaaaataaatcactttttatactaatatgacacgattaccaatacttttgttactaatatcattagtatacgctacaccttttcctcagacatctaaaaaaataggtgatgatgcaactttatcatgtaatcgaaataatacaaatgactacgttgttatgagtgcttggtataaggagcccaattccattattcttttagctgctaaaagcgacgtcttgtattttgataattataccaaggataaaatatcttacgactctccatacgatgatctagttacaactatcacaattaaatcattgactgctagagatgccggtacttatgtatgtgcattctttatgacatcgcctacaaatgacactgataaagtagattatgaagaatactccacagagttgattgtaaatacagatagtgaatcgactatagacataatactatctggatctacacattcaccggaaactagttctgagaaacctgattatatagataattctaattgctcgtcggtattcgaaatcgcgactccggaaccaattactgataatgtagaagatcatacagacaccgtcacatacactagtgatagcattaatacagtaagtgcatcatctggagaatccacaacagacgagactccggaaccaattactgataaagaagaagatcatacagttacagacactgtctcatacactacagtaagtacatcatctggaattgtcactactaaatcaaccaccgatgatgcggatctttatgatacgtacaatgataatgatacagtaccatcaactactgtaggcggtagtacaacctctattagcaattataaaaccaaggactttgtagaaatatttggtattaccgcattaattatattgtcggccgtggcaatattctgtattacatattatatatataataaacgttcacgtaaatacaaaacagagaacaaagtctagatttttgacttacataaatgtctgggatagtaaaatctatcatattgagcgggccatctggtttaggaaagacagccatagccaaaagactatgggaatatatttggatttgtggtgtcccataccactagatttcctcgtcctatggaacgagaaggtgtcgattaccattacgttaacagagaggccatctggaagggaatagccgccggaacatactgagtttttaggaaatatttacggaacttctaaaactgctgtgaatacagcggctattaataatcgtatttgtgtgatggatctaaacatcgacggtgttagaagttttaaaaatacttacctaatgccttactcggtgtatataagacctacctctcttaaaatggttgagaccaagcttcgttgtagaaacactgaagcggatgatgagattcatcgtcgtgtgatgttggcaaaaactgacatggatgaggcaggtgaagccggtctattcgacactattatcattgaagatgatgtgaatttagcatatagtaagttaattcagatactacaggaccgtattagaatgtattttaacactaattagagacttaagacttaaaacttgataattaataatataactcgtttttatatgtggctatttcaacgtctaatgtattagttaaatattaaaacttaccacgtaaaacttaaaatttaaaatgatatttcattgacagatagatcacacattatgaactttcaaggacttgtgttaactgacaattgcaaaaatcaatgggtcgttggaccattaataggaaaaggtggatttggtagtatttatactactaatgacaataattatgtagtaaaaatagagcccaaagctaacggatcattatttaccgaacaggcattttatactagagtacttaaaccatccgttatcgaagaatggaaaaaatctcacaatataaagcacgtaggtcttatcacgtgcaaggcatttggtctatacaaatccattaatgtggaatatcgattcttggtaattaatagattaggtgcagatctagatgcggtgatcagagccaataataatagattaccaaaaaggtcggtgatgttgatcggaatcgaaatcttaaataccatacaatttatgcacgagcaaggatattctcacggagatattaaagcgagtaatatagtcttggatcaaatagataagaataaattatatctagtggattacggattggtttctaaattcatgtctaatggcgaacatgttccatttataagaaatccaaataaaatggataacggtactctagaatttacacctatagattcgcataaaggatacgttgtatctagacgtggagatctagaaacacttggatattgtatgattagatggttgggaggtatcttgccatggactaagatatctgaaacaaagaattgtgcattagtaagtgccacaaaacagaaatatgttaacaatactgcgactttgttaatgaccagtttgcaatatgcacctagagaattgctgcaatatattaccatggtaaactctttgacatattttgaggaacccaattacgacaagtttcggcacatattaatgcagggtgtatattattaagtgtggtgtttggttgatgtaaaatttttgtcgataaaaattaaaaaataacttaatttattattgatctcgtgtgtacaaccgaaatcatggcgatgttttacgcacacgctctcggtgggtacgacgagaatcttcatgcctttcctggaatatcatcgactgttgccaatgatgtcagtttataataacaagtatgacattgtaaaagacaaatatatgtggtgttacagtcaggtgaacaagagatatattggagcactgctgcctatgtttgagtgcaatgaatatctacaaattggagatccgatccatgatcaagaaggaaatcacatatcgccacaaaaactactatgctctaagcggaatcgggtacgagagtctagacttgtgtttggaaggagtagggattcatcatcacgtacttgaaacagaaaacgctgtatatggaaaagttcaacatgattattctactatcaaagagaaggccaaagaaatgaatgcactcagttcaggacctatcatcgattaccacgtctggataggagattgtatctgtcaagttactgctgtggacgtacatggaaaggaaattatgagaatgagattcaaaaagggtgcggtgcttccgatcccaaatctggtaaaagttaaacttggggagaatgatacagaaaatctttcttctactatatcggcggcaccatcgaggtaaccacctctctggaagacagtgtgaatcatgtactcatgaaacgtttggaatctatacgccatatgtggtctgttgtatatgatcattttgatattgtgaatggtaaagaatgctgttatgtgcatacgcatttgtctaatcaaaatcttataccgagtactgtaaaaacaaatttgtacatgaagactatgggatcatgcattcaaatgagtatcttagcgaactgaaggaatcaggtggatggagtcccagaccagaaatgcaggaatttgaatatccagatggagtggaagacactgaatcaattgagagattggtagaggagttcttcaatagatcagaacttcaggctggtaaatctattaatgttaaacatacatctgtttcagctaagcaactaagaacacgtatactctcatcttttgccaacacagagggtggatatttgttcattggagttgataataatacacacaaagtatttggattcacggtgggttacgactacctcagactgatagagaatgatatagaaaagcatatcaaaagactttgtgttgtgtatttctgtgagaagaaagaggacatcaagtacacgtgtcgattcatcaaggtatataaacctggggatgaggctacctcgacatacgtgtgcgctatcaaagtggaaagatgctgttgtgctgtgtttgcagattggccagaatcatggtatcaagaagtattctccagatgaataggtgtcacatataaaattttaattaatgtaactatagagaacaaataataggttgtaatatcatatagacaataactaacaattaattagtaactgttatctctttttaactaactaactatacctattaatacatcgtaattatagttcttaacatctattaatcattgattcgcttctttaattttttataaaccaacattgttaattgaaaagggataacatgttacagaatataaattatatatggattttttttaaaaaggaaatacttgactggagtgtatatttatctcttcattatatagcacgcgtgttttccaatttttccacatcccatataatacaggattataatctcgttcgaacatacgagaaagtggataaaacaatagttgattttttatctaggttgccaaatttattccatattttagaatatggggaaaatattctacatatttattctatggatgatgctaatacgaatattataattttttttctagatagagtattaaatattaataagaacgggtcatttatacacaatctcaggttatcatcatccattaatataaaagaatatgtatatcaattagttaataatgatcatccagataataggataagactaatgcttgaaaatggacgtagaacaagacattttttgtcctatatatcagatacagttaatatctatatatgtattttatatagatgccgaagacagttacggttgtacattattacatagatgtatatatcactataagaaatcagaatcagaatcagaatcatacaatgaattaattaagatattgttaaataatggatcagatgtagataaaaaagatacgtacggaaacacaccttttatcctattatgtaaacacgatatcaacaacgtggaattgtttgagatatgtttagagaatgctaatatagactctgtagactttaatagatatacacctcttcattatgtctcatgtcgtaataaatatgattttgtaaagttattaatttctaaaggagcaaatgttaatgcgcgtaataaattcggaactactccattttattgtggaattatacacggtatctcgcttataaaactatatttggaatcagacacagagttagaaatagataatgaacatatagttcgtcatttaataatttttgatgctgttgaatctttagattatctattatccagaggagttattgatattaactatcgtactatttacgacgctgtcagttataatgcgtataatacgttggtctatctattaaacagaaatggtgattttgagacgattactactagtggatgtacatgtatttcggaagcagtcgcaaacaacaacaaaataataatggaagtactattgtctaaacgaccatctttgaaaattatgatacagtctatgatagcaattactaaacataaacagcataatgcagatttattgaaaatgtgtataaaatatactgcgtgtatgaccgattatgatactcttatagatgtacaatcactacagcaatataaatggtatattttaagatgtttcgatgaaatagatatcatgaagagatgttatataaaaaataaaactgtattccaattagttttttgtatcaaagacattaatactttaatgagatacggtaaacatccttctttcgtgaagtgcactagtctcgacgtatacggaagtcgtgtacgtaatatcatagcatctattagatatcgtcagagattaattagtctattatccaagaagctggatcctggagataaatggtcgtgttttcctaacgaaataaaatataacgataacgaactgtccacatatctaaaaatcttataaacactattaaaatataaaatcacactacatcattgtttccttttagtgctcgacagtgtatactatttttaacgctcataaataaaaatgaaaacgatttccgttgttacgttgttatgcgtactacctgctgttgtttattcaacatgtactgtacccactatgaataacgctaaattaacgtctaccgaaacatcgtttaataataaccagaaagttacgtttacatgtgatcagggatatcattcttcggatccaaatgctgtctgcgaaacagataaatggaaatacgaaaatccatgcaaaaaaatgtgcacagtttctgattacatctctgaactatataataaaccgctatacgaagtgaattccaccatgacactaagttgcaacggcgaaacaaaatattttcgttgcgaagaaaaaaatggaaatacttcttggaatgatactgttacgtgtcctaatgcggaatgtcaacctcttcaattagaacacggatcgtgtcaaccagttaaagaaaaatactcatttggggaatatataactatcaactgtgatgttggatatgaggttattggtgcttcgtacataagttgtacagctaattcttggaatgttattccatcatgtcaacaaaaatgtgatataccgtctctatctaatggattaatttccggatctacattttctatcggtggcgttatacatcttagttgtaaaagtggttttatactaacgggatctccatcatccacatgtatcgacggtaaatggaatcccatactcccaacatgtgtacgatctaacgaaaaatttgatccagtggatgatggtcccgacgatgagacagatttgagcaaactctcgaaagacgttgtacaatatgaacaagaaatagaatcgttagaagcaacttatcatataatcatagtggcgttaacaattatgggcgtcatatttttaatctccgttatagtattagtttgttcctgtgacaaaaataatgaccaatataagttccataaattgctaccgtgaatataaatccgttaaaataatgaataattaataattaataatttaataacaaacaagtatcaaaagattaaagacttatagctagaatcaattgagatgtcttcttcagtggatgttgatatctacgatgccgttagagcatttttactcaggcactattataacaagagatttattgtgtatggaagaagtaacgccatattacataatatatacaggctatttacaagatgcgccgttataccgttcgatgatatagtacgtactatgccaaatgaatcacgtgttaaacaatgggtgatggatacacttaatggtataatgatgaatgaacgcgatgtttctgtaagcgttggcaccggaatactattcatggaaatgtttttcgattacaataaaaatagtatcaacaatcaactaatgtatgatataattaatagcgtatctataattctagctaatgagagatatagaagcgcttttaacgacgatggtatatacatccgtagaaatatgattaacaagttgtacggatacgcatctctaactactattggcacgatcgctggaggtgtttgttattatctgttgatgcatctagttagtttgtataaataattatttcaatatactagttaaaattttaagattttaaatgtataaaaaactaataacgtttttatttgtaataggtgcattagcatcctattcgaataatgagtacactccgtttaataaactgagtgtaaaactctatatagatggagtagataatatagaaaattcatatactgatgataataatgaattggtgttaaattttaaagagtacacaatttctattattacagagtcatgcgacgtcggatttgattccatagatatagatgttataaacgactataaaattattgatatgtctactattcaacgcagaggtcacacgtgtagaatatctaccaaattatcatgccattatgataagtacccttatattcacaaatatgatggtgatgagcgacaatattctattactgcagagggaaaatgctataaaggaataaaatatgaaataagtatgatcaacgatgatactctattgagaaaacatactcttaaaattggatctacttatatatttgatcgtcatggacatagtaatacatattattcaaaatatgatttttaaaaatttaaaatatattatcacttcagtgacagtagtcaaataacaaacaacaccatgagatatattataattctcgcagttttgttcattaatagtatacacgctaaaataactagttataagtttgaatccgtcaattttgattccaaaattgaatggactggggatggtctatacaatatatcccttaaaaattatggcatcaagacgtggcaaacaatgtatacaaatgtaccagaaggaacatacgacatatccgcatttccaaagaatgatttcgtatctttctgggttaaatttgaacaaggcgattataaagtggaagagtattgtacgggaccaccgactgtaacattaactgaatacgacgaccatccgtatgctactagaggtagcaaaaagattcctatttacaaacgcggtgacatgtgtgatatctacttgttgtatacggctaacttcacattcggagattctaaagaaccagtaccatatgatatcgatgactacgattgcacgtctacaggttgcagcatagactttgtcacaacagaaaaagtgtgcgtgacagcacagggagccacagaagggtttctcgaaaaaattactccatggagttcgaaagtatgtctgacacctaaaaagagtgtatatacatgcgcaattagatccaaagaagatgttcccaatttcaaggacaaaatggccagagttatcaagagaaaatttaactaaatttctcggtagcacatcaaatgatgttaccacttttcttagcatgcttaacttgactaaatattcataactaatttttattaatgatacaaaaacgaaataaaactgcatattatacactggttaacgcccttataggctctaaccattttcaagatgaggtccctgattatagtccttctgttcccctctatcatctactccatgtctattagacgatgtgagaagactgaagaggaaacatggggattgaaaatagggttgtgtataattgccaaagatttctatcccgaaagaactgattgcagtgttcatctcccaactgcaagtgaaggcaatggattcagggatatacgaaacaccgataaattataaaaaaagcaatgtgtccgctgtttccgttaataatactattttcgtaactggcggattattcataaataactctaatagcacgatcgtggttaacaatatggaaaaacttgacatttataaagacaaacaatggtcgattatagaaatgcctatggctagggtatatcacggcatcgactcgacatttggaatgttatattttgccggaggtctatccgttaccgaacaatatggtaatttagagaaaaacaacgagatatcttgttacaatcctagaacgaataagtggtttgatatttcatatactatttataagatatccatatcatcattgtgtaaactaaataacgtcttctatgtatttagtaaggacattggatatgtggaaaagtatgatggtctccccgctataaaggcattatcaacttctccttattgattgaaaatgaaaatataaatagtttttatgtatagcagtattaccctatagttttattgcttactactaacatggatacagatacagatgttacaaatgtagaagatatcatgaatgaaatagatagagagaaagaagaaatactaaaaaatgtagaaattgaaaataataaaaacattaacaagaatcatcccaatgaatatattagagaagcactcgttattaatacaagtagtaatagtgattccattgataaagaagttatagaatgtatcagtcacgatgtaggaatatagatcatatctactaatttttataatcaatacaaaacataaaaaacaactcgttattacatagcaggcatggaatccttcaagtattgttttgataacgatggcaagaaatggattatcggaaatactttatattctggtaattcaatactctataaggtcagaaaaaatttcactagttcgttctacaattacgtaatgaagatagatcacaaatcacacaagccattgttgtctgaaatacgattctatatatctgtattggatcctttgactatcgacaactggacacgggaacgtggtataaagtatttggctattccagatctgtatggaattggagaaaccgatgattatatgttcttcgttataaagaatttgggaagagtattcgccccaaaggatactgaatcagtcttcgaagcatgcgtcactatgataaacacgttagagtttatacactctcgaggatttacccatggaaaaatagaaccgaggaatatactgattagaaataaacgtctttcactaattgactattctagaactaacaaactatacaagagtggaaactcacatatagattacaacgaggacatgataacttcaggaaatatcaattatatgtgtgtagacaatcatcttggagcaacagtttcaaaacgaggagatttagaaatgttgggatattgcatgatagaatggttcggtggcaaacttccatggaaaaacgaaagtagtataaaagtaataaaacaaaaaaaagaatataaaaaatttatagctactttctttgaggactgttttcctgaaggaaatgaacctctggaattagttagatatatagaattagtatacacgttagattattctcaaactcctaattatgacagactacgtagactgtttatacaagattgaaatattctttttttatagagtgtggtagtgttacggatatctaatattaatattagactatctctatcgcgctacacgaccaatatcgattactatggatatcttctatgaaaggagagaatgtattcatttctccagcgtcaatctcgtcagtattgacaatactgtattatggagctaatggatccactgctgaacagctatcaaaatatgtagaaaaggaggagaacacggataaggttagcgctcagaatatctcattcaaatccatgaataaagtatatgggcgatattctgccgtgtttaaagattcctttttgagaaaaattggcgataagtttcaaactgttgacttcactgattgtcgcactatagatgcaatcaacaagtgtgtagatatctttactgaggggaaaatcaatccactattggatgaacaattgtctcctagcaattagtgccgtatactttaaagcaaaatggttgacgccattcgaaaaggaatttaccagtgattatcccttttacgtatcaccaacggaaatggtagacgtaagtatgatgtctatgtacggcgagctatttaatcacgcatctgtaaaagaatcattcggtaacttttcaatcatagaactgccatatgttggagatactagtatgatggtcattcttccagacaagattgatggattagaatccatagaacaaaatctaacagatacaaattttaagaaatggtgtaactctctggaagctacgtttatcgatgttcacattcccaagtttaaggtaacaggctcgtataatctggtggatactctagtaaagtcaggactgacagaggtgttcggttcaactggagattatagcaatatgtgtaatttagatgtgagtgtcgacgctatgatccacaaaacgtatatagatgtcaatgaagagtatacagaagcagctgcagcaacttgtgcactggtgtcagactgtgcatcaacaattacaaatgagttctgtgtagatcatccgttcatctatgtgattaggcatgttgatggaaaaatttttttcgttggtagatattgctctccgacaactaattgttaaccattttttttaaaaaaatagaaaaaacatgtggtattagtgcaggtcgttattcttccaattgcaattggtaagatgacggccaactttagtacccacgtcttttcaccacagcactgtggatgtgacagactgaccagtattgatgacgtcaaacaatgtttgactgaatatatttattggtcgtcctatgcataccgcaacaggcaatgcgctggacaattgtattccacactcctctcttttagagatgatgcggaattagtgttcatcgacattcgcgagctggtaaaaaatatgccgtgggatgatgtcaaagattgtgtagaaatcatccgttgttatataccggatgagcaaaaaaccatcatcggactttgtgcatatgctgctacttactggggaggtgaagaccatcccactagtaacagtctgaacgcattgtttgtgatgcttgagatgctaaattacgtggattataacatcatattccggcgtatgaattgatgagttgtacatcttgacattttcttctttcttctcttctccctttcccagaaacaaactttttttacccactataaaataaaatgagtatactacctgttatatttctttctatatttttttattcttcattcgttcagacttttaacgcgcctgaatgtatcgacaaagggcaatattttgcatcattcatggagttagaaaacgagccagtaatcttaccatgtcctcaaataaatacgctatcatccggatataatatattagatattttatgggaaaaacgaggagcggataatgatagaattataccgatagataatggtagcaatatgctaattctgaacccgacacaatcagactctggtatttatatatgcattaccacgaacgaaacctactgtgacatgatgtcgttaaatttgacaatcgtgtctgtctcagaatcaaatatagatcttatctcgtatccacaaatagtaaatgagagatctactggcgaaatggtatgtcccaatattaatgcatttattgctagtaacgtaaacgcagatattatatggagcgggcatcgacgccttagaaataagagacttaaacaacggacacctggaattattaccatagaagatgttagaaaaaatgatgctggttattatacatgtgttttagaatatatatacggtggcaaaacatataacgtaaccagaattgtaaaattagaggtacgggataaaataataccttctactatgcaattaccagaaggtgttgtaacttcaataggtagtaatttgactattgcgtgtagagtatcgttgagacctcccacaacggatgcagacgtcttttggataagtaatggtatgtattacgaagaagatgatggggacggagacggtagaataagtgtagcaaataaaatctatatgaccgataagagacgtgttattacatcccggttaaacattaatcctgtcaaggaagaagatgctacaacgtttacgtgtatggcgtttactattcctagcatcagcaaaacagttactgttagtataacgtgaatgtatgttgttacatttccatgtcaattgagtttataagaatttttatacattatcttccaacaaacaattgacgaacgtattgctatgattaactcccacgatactatgcatattattaatcattaacttgcagactatacctagtgctattttgacatactcatgttcttgtgtaattgcggtatctatattattaaagtacgtaaatctagctatagttttattatttaattttagataatataccgtctccttatttttaaaaattgccacatcctttattaaatcatgaatgggaatttctatgtcatcgttaatatattgtgaacaacaagagcagatatctataggaaagggtggaatgcgatacattgatctatgtagttttaaaacacacgcgaactttgaagaatttatataaatcattccatcgatacatccttctatgttgacatgtatatatccaggaattcttttattaatgtcaggaaatgtataaactaaaacattgcccgaaagcggtgcctctatctgcgttatatccgttcttaacttacaaaatgtaaccaatacctttgcatgacttgttttgttcggcaacgttagtttaaacttgacgaatggattaattacaatagcatgatccgcgcatctattaagtttttttactttaacgcccttgtatgtttttacagagactttatctaaatttctagtgcttgtatgtgttataaatataacgggatatagaactgaatcacctaccttagatacccaattacattttatcagatccagataataaacaaattttgtcgccctaactaattctatattgttatatattttacaattggttatgatatcatgtaataacttggagtctaacgcgcatcgtcgtacgtttatacaattgtgatttagtgtagtatatctacacatgtatttttccgcactatagtattctggactagtgataaaactatcgttatatctgtcttcaatgaactcatcgagatattgctctctgtcatattcatacacctgcataaactttctagacatcttacaatccgtgttattttaggatcatatttacatatttacgggtatatcaaagatgttagattagttaatgggaatcgtctataataatgaatattaaacaattatatgaggacttttaccacaaagcatcataaaaatgagtcgtcgtctgatttatgttttaaatatcaaccgcgaatcaactcataaaatacaagagaatgaaatatatacatattttagtcattgcaatatagaccatacttctacagaacttgattttgtagttaaaaactatgatctaaacagacgacaacctgtaactgggtatactgcactacactgctatttgtataataattactttacaaacgatgtactgaagatattattaaatcatggagtggatgtaacgatgaaaaccagtagcggacgtatgcctgtttatatattgcttactagatgttgtaatatttcacatgatgtagtgatagatatgatagacaaagataaaaaccacttatcgcatagagactattccaacctactactagagtatataaaatctcgttacatgttattgaaggaagaggatatcgatgagaacatagtatccactttattagataagggaatcgatcctaactttaaacaagacggatatacagcgttacattattattatttgtgtctcgcacacgtttataaaccaggtgagtgtagaaaaccgataacgataaaaaaggccaagcgaattatttctttgtttatacaacatggagctaatctaaacgcgttagataattgtggtaatacaccattccatttgtatcttagtattgaaatgtgtaataatattcatatgactaaaatgctgttgacttttaatccgaatttcaaaatatgtaataatcatggattaacgcctatactatgttatataacttccgactacatacaacacgatattcttgttatgttaatacatcactatgaaacaaatgttggagaaatgccgatagatgagcgtcgtataatcgtattcgagtttatcaaaacatattctacacgtccggcagattcgataacttatttgatgaataggtttaaaaatatagatatttatacccgctatgaaggaaagacattattacacgtagcatgtgaatataataatacacacgtaatagattatcttatacgtatcaacggagatataaatgcgttaaccgacaataacaaacacgctacacaactcattatagataacaaagaaaattccccatataccattaattgtttactgtatatacttagatatattgtagataagaatgtgataagatcgttggtggatcaacttccatctctacctatcttcgatataaaatcatttgagaaattcatatcctactgtatacttttagatgacacattttacaatagacacgttaggaatcgcaattctaaaacgtatcgatacgcattttcaaaatacatgtcgtttgataaatacgatggtataataactaaatgtcataaagaaacaatattgctcaaactatccactgttctagacactacactatatgcagttttaagatgccataattcgaaaaagttaagaagatacctcaacgagttaaaaaaatataataacgataagtcctttaaaatatattctaatattatgaatgagagataccttaatgtatattataaagatatgtacgtgtcaaaggtatatgataaactatttcctgttttcacagataaaaattgtctactaacattactaccttcagaaattatatacgaaatattatacatgctgacaattaacgatctttataatatatcgtatccacctaccaaagtatagttgtatttttctcatgcgatgtgtgtaaaaaaactgatattatataaatattttagtgccgtataatgaagatgacgatgaaaatgatggtacatatatatttcgtatcattattgttattgctattccacagttacgccatagacatcgaaaatgaaatcacagaattcttcaataaaatgagagatactctaccagctaaagactctaaatggttgaatccagcatgtatgttcggaggcacaatgaatgatatagccgctctaggagagccattcagcgcaaagtgtcctcctattgaagacagtcttttatcgcacagatataaagactatgtggttaaatgggagaggctagaaaaaaatagacggcgacaggtttctaataaacgtgttaaacatggtgatttatggatagccaactatacatctaaattcagtaaccgtaggtatttgtgtaccgtaactacaaagaatggtgactgtgttcagggtatagttagatctcatattaaaaaacctccttcatgcattccaaaaacatatgaactaggtactcatgataagtatggcatagacttatactgtggaattctttacgcaaaacattataataatataacttggtataaagataataaggaaattaatatcgacgatattaagtattcacaaacgggaaagaaattaattattcataatccagagttagaagatagtggaagatacaactgttacgttcattacgacgacgttagaatcaagatgtaaaatacttacggttataccgtcgcaagaccacaggtttaaactaatactagatccaaaaatcaacgtaacgataggagaacctgccaatataacatgcactgctgtgtcaacgtcattattgattgacgatgtactgattgaatgggaaaatccatccggatggcttataggattcgattttgatgtatactctgttttaactagtagaggcggtatcaccgaggcgaccttgtactttgaaaatgttactgaagaatatataggtaatacatataaatgtcgtggacacaactattattttgaaaaaacccttacaactacagtagtattggagtaaatacacaatgcatttttatatacattactgaataattattattattatttatatcgtatttgtgctataacgcgactatctaggtatttgtatctcaccgatagagaacatataaatgtagactctattaaacagttgtgtaaaatatcagatcctaatagatgtggatgtacggctttagaaatgagttcattaaaatatgtgatatcaacggaacatatttatataattatactattgctgttagtataattattgattccacggaagaactaccaacagttactccaattacaacaacatataattatactatcgatgatagcactactgaagaactacaagtgactcctcatatggatctccatcgatgatacatgtattaaaatactttccgaataagtcttttaaatattgtattaattatgaaaaactatgctatgcgagtatgatacgatactagattttatctctagcgagagatgtcgttagaatcatttatcaacgaatatcgataacatgtgtcatttatacgttaaagtctgtccgtcttctctattgtttagactgtttgtagaatgctgtgatataaacaaactagtagacacaaatatttaactcatgatgaagttgagaatgatatgctttagctaatataaaaatatattaatccactatatattctagacttgatttaaaaccgataaactactactacgtactgtataagttaggagcagaccctaattatgtagatgatagaggtaatacttctgcatctatatgtccacttatgagaaaacgtcatttaataagatgcatcgtgaaaagaaatttattaaagagttggtaaaatatgaaaccgaaagtaaataatataggaaatacacctctacataactacgtatctcaatatgatatcactctcattcctcatccacaacccattaaaaaatggaaattaaagccctctattagcataaacggctacaggtctacctttacaatggcctttccttgtgcccagttcagaccctgtcattgccacgctactaaggactccctgaataccgtggccgacgtcagacattgtctgactgaatacatcctgtgggtttctcatagatggacccatagagaaagcgcagggtctctctacaggcttctcatctctttcagaactgatgcaacggagctctttggtggtgagttgaaggattcacttccgtggagatcattaaatgactccatgaaaaccgccgaagaacttcgtgcaatcattggactttgtactcaatcagctatcgtctctggaagagtcttcaacgataagtatatcgacatactacttatgctgcgaaagattctgaacgagaacgactatctcaccctcttggatcatatccgcactgctaaatactaaatctccttcatgctctctcactacactttttatcatcttatgaggaataattagcaccagaatagctatggattgcacatgtattctatgtcgtctactggatgaagatgtgacgtacaaaaaaataaaactagaaattgaaacgtgtcacaacttatcaaaacatatagatagacgaggaaacaatgcgctacattgttacgtctccaataaatgcgatacagacattaagattgttcgactgttactctctcgcggagtcgagagactttgtagaaacaacgaaggattaactccgctaggagcatacagtaagcatagatacgtaaaatctcagattgtgcatctactgatatccagctattcgaattcctctaacgaactcaagtcgaatataaatgatttcgacttacgtctgctaaaatacctaattgtggataaacggatacgtccgtccaagaatacgaattatgcaatcaatggtctcggattggtggatatatacgtaacgacgcctaatccgagaccagaagtattgctatggcttcttaaatcagaatgttacagcaccggttacgtatttcgtacctgtatgtacaacagtgatatgtgtaagaactctcttcattactatatatcgtctcatagagaatctctatccaaggatgtaattaaatgtttgatcgataacaatgtttccatccaatactactggtcttgctcaaccatagatatagagattattaataaaggatgtggacacgtgtagagtatacgacgtcagccctatattagaggcgtattatctaaacaagcgatttagagtaaccccatataatgtagacatggaaatcgttaatcttcttattgagagacgtcatactcttgtcgacgtaatgcgtagtattacttcgtacgattccagagaatataaccactacatcatcgataacattctaaagagatttagacaacaggatgaatccatcgtacaagccatactgataaactacttacattacggcgatatggtaagtatacctatcattcaatgcatgttggataagacgacggacaacaactttgttaataataatctcgtcgatgtaaacgtcgtaaggtttatcgtggaaaatatggacacgcggctgtaaatcacatatctaacaatggccgtctatgtatgtacggtctgatattatcgagatttaataattgcgggtatcactgttatgaagatgtatttgatatactaagcaagtacatggatgatatagatatgatcgataactctactatattacgcggtcgatgtcaataatatacaatttgcaaagcggttattggaatatggagcgagtgtcacgctcgataatcaatacggccatccagaaaagcagttaccaaagagaagctagttgatttattactgagttaccatcccactctagagactatgattgacgcatttaatagagatatacgctatctatatcctgaaccattattcgcctgtatcagatacgccttaatcctagatgatgattttccttctaaagtaagtatgatatcgccggtcgtcataaggaactaaagcgctatagagcagacattaatagaatgaagaatgcctacatatcaggcgtctccatgtttgatatattatttaaacgaagcaaacgccacagattgagatacgcaaagaacaatgagaggatcgactccattaaataatttatcatggagtgataatgtcctgtttccatggcatattacaaaatcgattccgtccaagatgataaaaacatttaccggcatcataaacacggagtttattttatatgtctcgcataaacattactaaaaaaatatattgttcggttttctttcacatctttaattatgaaaaagtaaatcattatgagatggacgcatcgttcgcgacagtatgtggtacatacctaacgtatttatggacgacggtaagaatgaaggtcacgtttctgtcaacaatgtcgacgcgatcgtgtaacacgactcacaatagaatctgtgaatgctctcccgatcatggatgcaaggcatgtgtttcccaaacaaaatgtggaataggatacggagtatccggagacgtcatctgttctccgtgtggtctcggaacatattctcacaccgtctcttccgcagataaatgcgaacccgtacccagaaatacctttaactatatcgatgtggaaattaacctgtatccagttaacgacacatcgtgtactcggacgaccactaccggtctcagcgaatccatctcaacgtcggaactaactattactatgaatcataaagactgcgatcccgtcttcttaataaggtagcgacttcaggtttctttacaggagaaaggtgtgcactctgaatttcgagattaaatgcaataacaaagattcttcctccaaacagttaacgaaagcaaagaatgatactatcatgccgcattcggagacagtaactctagcgtcgacatctatatactatatagtaataccaatactcaagactacgaaactgatacaatctcttatcatgtgggtaatgtagccatatgcccggtagttgcgatatacataaactgatcactaattccaaacccacccgctttttatagtaagtttttcacccataaatacaataattaatttctcgtaaaagtagaaaatatattctaatttattgcacggtaaggaagtagaatcataaagaacagtactcaatcaatagcaatcatgaaacaatatatcgtactggcatgcatgtgcctgccagtcttcagcaatcatcctcatcgtgtacggaagaagaaaacaaacatcatatgggaatcgatgttattatcaaagtcacaaagcaagaccaaacaccgaccgatgataagatttgccaatccgtaacggaaattacagagtccgagtcagatccagatcccgaggtggaatcagtcgaggatgtagatcctcctaccacttattactccatcatcggtggaggtctgagaatgaactttggattcaccaaatgtcctcagattaaatccatctcagaatccgctgatggaaagactgtgaggtgtctatcgacatcagatgtagcgaagaagagaaagacagcgacatcaagacccatccagtactcgggtctaacatctctcataagaaagtgagttacgaagatatcatcggttcaacgatcgtcgatacaaaatgtgtcaagaatctagagtttagcgttcgtatcggagacatgtgcaaggaatcatctgaacttgaggtcaagtatgtcgacggatcggcatctgaaggtgcaaccgatgatacttcactcatcgattcaacaaaactcaaagcgtgtgtctgaatcgataactctattcatctgaaattggatgagtagggttaatcgaacgattcaggcacaccacgaattaaaaaagtgtaccggacactatattccggtttgcaaaacaaaaagttacctctcgcgacttcttctttttctgtctcaatagtgtgatacgattatgacactattcctatttcctttcagggtatcacaaaaatattaaacctctttctgatggtctcatacaaaaatatttttattctctttctctctttgatggtctcataaaaaatatttttattctctttctctctttgatggtctcataaaatatttttattctctttctctctttgatggtctcataaaaaatatttttattctctttctctctttgatggtctcataaaatatttttattctctttctctctttgatggtctcataaaaaatatttttattctctttctctctttgatggtctcataaaa

SEQ ID NO: 3 - DNA, 3822 bp, Artificial Sequence
  NCBI SARS-CoV-2 reference strain
atgtttgtttttcttgttttattgccactagtctctagtcagtgtgttaatcttacaaccagaactcaattaccccctgcatacactaattctttcacacgtggtgtttattaccctgacaaagttttcagatcctcagttttacattcaactcaggacttgttcttacctttcttttccaatgttacttggttccatgctatacatgtctctgggaccaatggtactaagaggtttgataaccctgtcctaccatttaatgatggtgtttattttgcttccactgagaagtctaacataataagaggctggatttttggtactactttagattcgaagacccagtccctacttattgttaataacgctactaatgttgttattaaagtctgtgaatttcaattttgtaatgatccatttttgggtgtttattaccacaaaaacaacaaaagttggatggaaagtgagttcagagtttattctagtgcgaataattgcacttttgaatatgtctctcagccttttcttatggaccttgaaggaaaacagggtaatttcaaaaatcttagggaatttgtgtttaagaatattgatggttattttaaaatatattctaagcacacgcctattaatttagtgcgtgatctccctcagggtttttcggctttagaaccattggtagatttgccaataggtattaacatcactaggtttcaaactttacttgctttacatagaagttatttgactcctggtgattcttcttcaggttggacagctggtgctgcagcttattatgtgggttatcttcaacctaggacttttctattaaaatataatgaaaatggaaccattacagatgctgtagactgtgcacttgaccctctctcagaaacaaagtgtacgttgaaatccttcactgtagaaaaaggaatctatcaaacttctaactttagagtccaaccaacagaatctattgttagatttcctaatattacaaacttgtgcccttttggtgaagtttttaacgccaccagatttgcatctgtttatgcttggaacaggaagagaatcagcaactgtgttgctgattattctgtcctatataattccgcatcattttccacttttaagtgttatggagtgtctcctactaaattaaatgatctctgctttactaatgtctatgcagattcatttgtaattagaggtgatgaagtcagacaaatcgctccagggcaaactggaaagattgctgattataattataaattaccagatgattttacaggctgcgttatagcttggaattctaacaatcttgattctaaggttggtggtaattataattacctgtatagattgtttaggaagtctaatctcaaaccttttgagagagatatttcaactgaaatctatcaggccggtagcacaccttgtaatggtgttgaaggttttaattgttactttcctttacaatcatatggtttccaacccactaatggtgttggttaccaaccatacagagtagtagtactttcttttgaacttctacatgcaccagcaactgtttgtggacctaaaaagtctactaatttggttaaaaacaaatgtgtcaatttcaacttcaatggtttaacaggcacaggtgttcttactgagtctaacaaaaagtttctgcctttccaacaatttggcagagacattgctgacactactgatgctgtccgtgatccacagacacttgagattcttgacattacaccatgttcttttggtggtgtcagtgttataacaccaggaacaaatacttctaaccaggttgctgttctttatcaggatgttaactgcacagaagtccctgttgctattcatgcagatcaacttactcctacttggcgtgtttattctacaggttctaatgtttttcaaacacgtgcaggctgtttaataggggctgaacatgtcaacaactcatatgagtgtgacatacccattggtgcaggtatatgcgctagttatcagactcagactaattctcctcggcgggcacgtagtgtagctagtcaatccatcattgcctacactatgtcacttggtgcagaaaattcagttgcttactctaataactctattgccatacccacaaattttactattagtgttaccacagaaattctaccagtgtctatgaccaagacatcagtagattgtacaatgtacatttgtggtgattcaactgaatgcagcaatcttttgttgcaatatggcagtttttgtacacaattaaaccgtgctttaactggaatagctgttgaacaagacaaaaacacccaagaagtttttgcacaagtcaaacaaatttacaaaacaccaccaattaaagattttggtggttttaatttttcacaaatattaccagatccatcaaaaccaagcaagaggtcatttattgaagatctacttttcaacaaagtgacacttgcagatgctggcttcatcaaacaatatggtgattgccttggtgatattgctgctagagacctcatttgtgcacaaaagtttaacggccttactgttttgccacctttgctcacagatgaaatgattgctcaatacacttctgcactgttagcgggtacaatcacttctggttggacctttggtgcaggtgctgcattacaaataccatttgctatgcaaatggcttataggtttaatggtattggagttacacagaatgttctctatgagaaccaaaaattgattgccaaccaatttaatagtgctattggcaaaattcaagactcactttcttccacagcaagtgcacttggaaaacttcaagatgtggtcaaccaaaatgcacaagctttaaacacgcttgttaaacaacttagctccaattttggtgcaatttcaagtgttttaaatgatatcctttcacgtcttgacaaagttgaggctgaagtgcaaattgataggttgatcacaggcagacttcaaagtttgcagacatatgtgactcaacaattaattagagctgcagaaatcagagcttctgctaatcttgctgctactaaaatgtcagagtgtgtacttggacaatcaaaaagagttgatttttgtggaaagggctatcatcttatgtccttccctcagtcagcacctcatggtgtagtcttcttgcatgtgacttatgtccctgcacaagaaaagaacttcacaactgctcctgccatttgtcatgatggaaaagcacactttcctcgtgaaggtgtctttgtttcaaatggcacacactggtttgtaacacaaaggaatttttatgaaccacaaatcattactacagacaacacatttgtgtctggtaactgtgatgttgtaataggaattgtcaacaacacagtttatgatcctttgcaacctgaattagactcattcaaggaggagttagataaatattttaagaatcatacatcaccagatgttgatttaggtgacatctctggcattaatgcttcagttgtaaacattcaaaaagaaattgaccgcctcaatgaggttgccaagaatttaaatgaatctctcatcgatctccaagaacttggaaagtatgagcagtatataaaatggccatggtacatttggctaggttttatagctggcttgattgccatagtaatggtgacaattatgctttgctgtatgaccagttgctgtagttgtctcaagggctgttgttcttgtggatcctgctgcaaatttgatgaagacgactctgagccagtgctcaaaggagtcaaattacattacacataa

SEQ ID NO: 4 - protein, 1273 aa, Artificial Sequence
  NCBI SARS-CoV-2 reference strain
MFVFLVLLPLVSSQCVNLTTRTQLPPAYTNSFTRGVYYPDKVFRSSVLHSTQDLFLPFFSNVTWFHAIHVSGTNGTKRFDNPVLPFNDGVYFASTEKSNIIRGWIFGTTLDSKTQSLLIVNNATNVVIKVCEFQFCNDPFLGVYYHKNNKSWMESEFRVYSSANNCTFEYVSQPFLMDLEGKQGNFKNLREFVFKNIDGYFKIYSKHTPINLVRDLPQGFSALEPLVDLPIGINITRFQTLLALHRSYLTPGDSSSGWTAGAAAYYVGYLQPRTFLLKYNENGTITDAVDCALDPLSETKCTLKSFTVEKGIYQTSNFRVQPTESIVRFPNITNLCPFGEVFNATRFASVYAWNRKRISNCVADYSVLYNSASFSTFKCYGVSPTKLNDLCFTNVYADSFVIRGDEVRQIAPGQTGKIADYNYKLPDDFTGCVIAWNSNNLDSKVGGNYNYLYRLFRKSNLKPFERDISTEIYQAGSTPCNGVEGFNCYFPLQSYGFQPTNGVGYQPYRVVVLSFELLHAPATVCGPKKSTNLVKNKCVNFNFNGLTGTGVLTESNKKFLPFQQFGRDIADTTDAVRDPQTLEILDITPCSFGGVSVITPGTNTSNQVAVLYQDVNCTEVPVAIHADQLTPTWRVYSTGSNVFQTRAGCLIGAEHVNNSYECDIPIGAGICASYQTQTNSPRRARSVASQSIIAYTMSLGAENSVAYSNNSIAIPTNFTISVTTEILPVSMTKTSVDCTMYICGDSTECSNLLLQYGSFCTQLNRALTGIAVEQDKNTQEVFAQVKQIYKTPPIKDFGGFNFSQILPDPSKPSKRSFIEDLLFNKVTLADAGFIKQYGDCLGDIAARDLICAQKFNGLTVLPPLLTDEMIAQYTSALLAGTITSGWTFGAGAALQIPFAMQMAYRFNGIGVTQNVLYENQKLIANQFNSAIGKIQDSLSSTASALGKLQDVVNQNAQALNTLVKQLSSNFGAISSVLNDILSRLDKVEAEVQIDRLITGRLQSLQTYVTQQLIRAAEIRASANLAATKMSECVLGQSKRVDFCGKGYHLMSFPQSAPHGVVFLHVTYVPAQEKNFTTAPAICHDGKAHFPREGVFVSNGTHWFVTQRNFYEPQIITTDNTFVSGNCDVVIGIVNNTVYDPLQPELDSFKEELDKYFKNHTSPDVDLGDISGINASVVNIQKEIDRLNEVAKNLNESLIDLQELGKYEQYIKWPWYIWLGFIAGLIAIVMVTIMLCCMTSCCSCLKGCCSCGSCCKFDEDDSEPVLKGVKLHYT

SEQ ID NO: 5 - DNA, 3822 bp, Artificial Sequence
  Wuhan-Hu-1 reference strain
atgtttgtctttcttgtcttattgccactagtctctagtcagtgtgttaatcttacaaccagaactcaattaccacctgcatacactaattctttcacacgtggtgtttattaccctgacaaagtattcagatcctcagtattacattcaactcaggacttgttcttacctttcttctccaatgttacttggttccatgctatacatgtctctgggaccaatggtactaagaggtttgataaccctgtcctaccatttaatgatggtgtttatttcgcttccactgagaagtctaacataataagaggctggatatttggtactactttagattcgaagacccagtccctacttattgttaataacgctactaatgttgttattaaagtctgtgaatttcaattctgtaatgatccattcttgggtgtttattaccacaagaacaacaagagttggatggaaagtgagttcagagtttattctagtgcgaataattgcactttcgaatatgtctctcagcctttccttatggaccttgaaggtaaacagggtaatttcaagaatcttagggaatttgtgtttaagaatattgatggttatttcaagatatattctaagcacacgcctattaatttagtgcgtgatctccctcagggtttctcggctttagaaccattggtagatttgccaataggtattaacatcactaggtttcaaactttacttgctttacatagaagttatttgactcctggtgattcttcttcaggttggacagctggtgctgcagcttattatgtgggttatcttcaacctaggactttcctattgaaatataatgagaatggaaccattacagatgctgtagactgtgcacttgaccctctctcagaaacaaagtgtacgttgaaatccttcactgtagagaaaggaatctatcaaacttctaactttagagtccaaccaacagaatctattgttagatttcctaatattacaaacttgtgccctttcggtgaagtatttaacgccaccagatttgcatctgtttatgcttggaacaggaagagaatcagcaactgtgttgctgattattctgtcctatataattccgcatcattctccacatttaagtgttatggagtgtctcctactaaattaaatgatctctgctttactaatgtctatgcagattcatttgtaattagaggtgatgaagtcagacaaatcgctccagggcaaactggaaagattgctgattataattataaattaccagatgactttacaggctgcgttatagcttggaattctaacaatcttgattctaaggttggtggtaattataattacctgtatagattgtttaggaagtctaatctcaaacctttcgagagagatatttcaactgaaatctatcaggccggtagcacaccttgtaatggtgttgaaggatttaattgttactttcctttacaatcatatggtttccaacccactaatggtgttggttaccaaccatacagagtagtagtactttcatttgaacttctacatgcaccagcaactgtttgtggacctaagaagtctactaatttggttaagaacaaatgtgtcaatttcaacttcaatggtttaacaggcacaggtgttcttactgagtctaacaagaagtttctgcctttccaacaatttggcagagacattgctgacactactgatgctgtccgtgatccacagacacttgagattcttgacattacaccatgttcatttggtggtgtcagtgttataacaccaggaacaaatacttctaaccaggttgctgttctttatcaggatgttaactgcacagaagtccctgttgctattcatgcagatcaacttactcctacttggcgtgtttattctacaggttctaatgtatttcaaacacgtgcaggctgtttaataggagctgaacatgtcaacaactcatatgagtgtgacatacccattggtgcaggtatatgcgctagttatcagactcagactaattctcctcggcgggcacgtagtgtagctagtcaatccatcattgcctacactatgtcacttggtgcagagaattcagttgcttactctaataactctattgccatacccacaaactttactattagtgttaccacagaaattctaccagtgtctatgaccaagacatcagtagattgtacaatgtacatttgtggtgattcaactgaatgcagcaatctattgttgcaatatggcagtttctgtacacaattaaaccgtgctttaactggaatagctgttgaacaagacaagaacacccaagaagtatttgcacaagtcaaacaaatttacaagacaccaccaattaaagatttcggtggatttaatttctcacaaatattaccagatccatctaaaccaagcaagaggtcatttattgaagatctactattcaacaaagtgacacttgcagatgctggcttcatcaaacaatatggtgattgccttggtgatattgctgctagagacctcatttgtgcacagaagtttaacggccttactgtattgccacctttgctcacagatgaaatgattgctcaatacacttctgcactgttagcgggtacaatcacttctggttggacctttggtgcaggtgctgcattacaaataccatttgctatgcaaatggcttataggtttaatggtattggagttacacagaatgttctctatgagaaccagaaattgattgccaaccaatttaatagtgctattggcaagattcaagactcactttcttccacagcaagtgcacttggtaaacttcaagatgtggtcaaccagaatgcacaagctttaaacacgcttgttaaacaacttagctccaactttggtgcaatttcaagtgtattaaatgatatcctttcacgtcttgacaaagttgaggctgaagtgcaaattgataggttgatcacaggcagacttcaaagtttgcagacatatgtgactcaacaattaattagagctgcagaaatcagagcttctgctaatcttgctgctactaagatgtcagagtgtgtacttggacaatctaagagagttgatttctgtggaaagggctatcatcttatgtccttccctcagtcagcacctcatggtgtagtcttcttgcatgtgacttatgtccctgcacaagagaagaacttcacaactgctcctgccatttgtcatgatggtaaagcacactttcctcgtgaaggtgtctttgtttcaaatggcacacactggtttgtaacacaaaggaatttctatgaaccacaaatcattactacagacaacacatttgtgtctggtaactgtgatgttgtaataggaattgtcaacaacacagtttatgatcctttgcaacctgaattagactcattcaaggaggagttagataaatatttcaagaatcatacatcaccagatgttgatttaggtgacatctctggcattaatgcttcagttgtaaacattcagaaagaaattgaccgcctcaatgaggttgccaagaatttaaatgaatctctcatcgatctccaagaacttggaaagtatgagcagtatatcaaatggccatggtacatttggctaggtttcatagctggcttgattgccatagtaatggtgacaattatgctttgctgtatgaccagttgctgtagttgtctcaagggctgttgttcttgtggatcctgctgcaaatttgatgaagacgactctgagccagtgctcaaaggagtcaaattacattacacataa

SEQ ID NO: 6 - protein, 1273 aa, Artificial Sequence; identical to SEQ ID NO: 4
  SARS-CoV-2 S antigen sequence

SEQ ID NO: 7 - DNA, 1260 bp, Artificial Sequence
  NCBI SARS-CoV-2 reference strain
atgtctgataatggaccccaaaatcagcgaaatgcaccccgcattacgtttggtggaccctcagattcaactggcagtaaccagaatggagaacgcagtggggcgcgatcaaaacaacgtcggccccaaggtttacccaataatactgcgtcttggttcaccgctctcactcaacatggcaaggaagaccttaaattccctcgaggacaaggcgttccaattaacaccaatagcagtccagatgaccaaattggctactaccgaagagctaccagacgaattcgtggtggtgacggtaaaatgaaagatctcagtccaagatggtatttctactacctaggaactgggccagaagctggacttccctatggtgctaacaaagacggcatcatatgggttgcaactgagggagccttgaatacaccaaaagatcacattggcacccgcaatcctgctaacaatgctgcaatcgtgctacaacttcctcaaggaacaacattgccaaaaggcttctacgcagaagggagcagaggcggcagtcaagcctcttctcgttcctcatcacgtagtcgcaacagttcaagaaattcaactccaggcagcagtaggggaacttctcctgctagaatggctggcaatggcggtgatgctgctcttgctttgctgctgcttgacagattgaaccagcttgagagcaaaatgtctggtaaaggccaacaacaacaaggccaaactgtcactaagaaatctgctgctgaggcttctaagaagcctcggcaaaaacgtactgccactaaagcatacaatgtaacacaagctttcggcagacgtggtccagaacaaacccaaggaaattttggggaccaggaactaatcagacaaggaactgattacaaacattggccgcaaattgcacaatttgcccccagcgcttcagcgttcttcggaatgtcgcgcattggcatggaagtcacaccttcgggaacgtggttgacctacacaggtgccatcaaattggatgacaaagatccaaatttcaaagatcaagtcattttgctgaataagcatattgacgcatacaaaacattcccaccaacagagcctaaaaaggacaaaaagaagaaggctgatgaaactcaagccttaccgcagagacagaagaaacagcaaactgtgactcttcttcctgctgcagatttggatgatttctccaaacaattgcaacaatccatgagcagtgctgactcaactcaggcctaa

SEQ ID NO: 8 - protein, 419 aa, Artificial Sequence
  NCBI SARS-CoV-2 reference strain
MSDNGPQNQRNAPRITFGGPSDSTGSNQNGERSGARSKQRRPQGLPNNTASWFTALTQHGKEDLKFPRGQGVPINTNSSPDDQIGYYRRATRRIRGGDGKMKDLSPRWYFYYLGTGPEAGLPYGANKDGIIWVATEGALNTPKDHIGTRNPANNAAIVLQLPQGTTLPKGFYAEGSRGGSQASSRSSSRSRNSSRNSTPGSSRGTSPARMAGNGGDAALALLLLDRLNQLESKMSGKGQQQQGQTVTKKSAAEASKKPRQKRTATKAYNVTQAFGRRGPEQTQGNFGDQELIRQGTDYKHWPQIAQFAPSASAFFGMSRIGMEVTPSGTWLTYTGAIKLDDKDPNFKDQVILLNKHIDAYKTFPPTEPKKDKKKKADETQALPQRQKKQQTVTLLPAADLDDFSKQLQQSMSSADSTQA

SEQ ID NO: 9 - DNA, 1260 bp, Artificial Sequence
  Wuhan-Hu-1 reference strain
atgtctgataacggaccacagaatcagcgaaacgcaccacgcattacgtttggtggaccctcagattcaactggcagtaaccagaatggagaacgcagtggagcgcgatctaaacaacgtcggcctcaaggtttacccaataatactgcgtcttggttcaccgctctcactcaacatggcaaggaagaccttaaattccctcgaggacaaggcgttccaattaacaccaatagcagtccagatgaccaaattggctactaccgaagagctaccagacgaattcgtggtggtgacggtaagatgaaagatctcagtccaagatggtatttctactacctaggaactgggccagaagctggacttccctatggtgctaacaaagacggcatcatatgggttgcaactgagggagccttgaatacacctaaagatcacattggcacccgcaatcctgctaacaatgctgcaatcgtgctacaacttcctcaaggaacaacattgcctaaaggcttctacgcagaagggagcagaggcggcagtcaagcctcttctcgttcctcatcacgtagtcgcaacagttcaagaaattcaactccaggcagcagtagaggaacttctcctgctagaatggctggcaatggcggtgatgctgctcttgctttgctgctgcttgacagattgaaccagcttgagagcaagatgtctggtaaaggccaacaacaacaaggccaaactgtcactaagaaatctgctgctgaggcttctaagaagcctcggcagaaacgtactgccactaaagcatacaatgtaacacaagctttcggcagacgtggtccagaacaaacccaaggaaactttggagaccaggaactaatcagacaaggaactgattacaaacattggccgcaaattgcacaatttgctcccagcgcttcagcgttcttcggaatgtcgcgcattggcatggaagtcacaccttcgggaacgtggttgacctacacaggtgccatcaaattggatgacaaagatccaaatttcaaagatcaagtcatattgctgaataagcatattgacgcatacaagacattcccaccaacagagcctaagaaggacaagaagaagaaggctgatgaaactcaagccttaccgcagagacagaagaaacagcaaactgtgactcttcttcctgctgcagatttggatgatttctccaaacaattgcaacaatccatgagcagtgctgactcaactcaggcctaa

SEQ ID NO: 10 - protein, 419 aa, Artificial Sequence; identical to SEQ ID NO: 8
  Wuhan-Hu-1 reference strain

SEQ ID NO: 11 - DNA, 3822 bp, Artificial Sequence
  Wuhan-Hu-1 reference strain
  misc_feature (986)..(986): lysine
  misc_feature (987)..(987): valine
atgtttgtctttcttgtcttattgccactagtctctagtcagtgtgttaatcttacaaccagaactcaattaccacctgcatacactaattctttcacacgtggtgtttattaccctgacaaagtattcagatcctcagtattacattcaactcaggacttgttcttacctttcttctccaatgttacttggttccatgctatacatgtctctgggaccaatggtactaagaggtttgataaccctgtcctaccatttaatgatggtgtttatttcgcttccactgagaagtctaacataataagaggctggatatttggtactactttagattcgaagacccagtccctacttattgttaataacgctactaatgttgttattaaagtctgtgaatttcaattctgtaatgatccattcttgggtgtttattaccacaagaacaacaagagttggatggaaagtgagttcagagtttattctagtgcgaataattgcactttcgaatatgtctctcagcctttccttatggaccttgaaggtaaacagggtaatttcaagaatcttagggaatttgtgtttaagaatattgatggttatttcaagatatattctaagcacacgcctattaatttagtgcgtgatctccctcagggtttctcggctttagaaccattggtagatttgccaataggtattaacatcactaggtttcaaactttacttgctttacatagaagttatttgactcctggtgattcttcttcaggttggacagctggtgctgcagcttattatgtgggttatcttcaacctaggactttcctattgaaatataatgagaatggaaccattacagatgctgtagactgtgcacttgaccctctctcagaaacaaagtgtacgttgaaatccttcactgtagagaaaggaatctatcaaacttctaactttagagtccaaccaacagaatctattgttagatttcctaatattacaaacttgtgccctttcggtgaagtatttaacgccaccagatttgcatctgtttatgcttggaacaggaagagaatcagcaactgtgttgctgattattctgtcctatataattccgcatcattctccacatttaagtgttatggagtgtctcctactaaattaaatgatctctgctttactaatgtctatgcagattcatttgtaattagaggtgatgaagtcagacaaatcgctccagggcaaactggaaagattgctgattataattataaattaccagatgactttacaggctgcgttatagcttggaattctaacaatcttgattctaaggttggtggtaattataattacctgtatagattgtttaggaagtctaatctcaaacctttcgagagagatatttcaactgaaatctatcaggccggtagcacaccttgtaatggtgttgaaggatttaattgttactttcctttacaatcatatggtttccaacccactaatggtgttggttaccaaccatacagagtagtagtactttcatttgaacttctacatgcaccagcaactgtttgtggacctaagaagtctactaatttggttaagaacaaatgtgtcaatttcaacttcaatggtttaacaggcacaggtgttcttactgagtctaacaagaagtttctgcctttccaacaatttggcagagacattgctgacactactgatgctgtccgtgatccacagacacttgagattcttgacattacaccatgttcatttggtggtgtcagtgttataacaccaggaacaaatacttctaaccaggttgctgttctttatcaggatgttaactgcacagaagtccctgttgctattcatgcagatcaacttactcctacttggcgtgtttattctacaggttctaatgtatttcaaacacgtgcaggctgtttaataggagctgaacatgtcaacaactcatatgagtgtgacatacccattggtgcaggtatatgcgctagttatcagactcagactaattctcctcggcgggcacgtagtgtagctagtcaatccatcattgcctacactatgtcacttggtgcagagaattcagttgcttactctaataactctattgccatacccacaaactttactattagtgttaccacagaaattctaccagtgtctatgaccaagacatcagtagattgtacaatgtacatttgtggtgattcaactgaatgcagcaatctattgttgcaatatggcagtttctgtacacaattaaaccgtgctttaactggaatagctgttgaacaagacaagaacacccaagaagtatttgcacaagtcaaacaaatttacaagacaccaccaattaaagatttcggtggatttaatttctcacaaatattaccagatccatctaaaccaagcaagaggtcatttattgaagatctactattcaacaaagtgacacttgcagatgctggcttcatcaaacaatatggtgattgccttggtgatattgctgctagagacctcatttgtgcacagaagtttaacggccttactgtattgccacctttgctcacagatgaaatgattgctcaatacacttctgcactgttagcgggtacaatcacttctggttggacctttggtgcaggtgctgcattacaaataccatttgctatgcaaatggcttataggtttaatggtattggagttacacagaatgttctctatgagaaccagaaattgattgccaaccaatttaatagtgctattggcaagattcaagactcactttcttccacagcaagtgcacttggtaaacttcaagatgtggtcaaccagaatgcacaagctttaaacacgcttgttaaacaacttagctccaactttggtgcaatttcaagtgtattaaatgatatcctttcacgtcttgacccacctgaggctgaagtgcaaattgataggttgatcacaggcagacttcaaagtttgcagacatatgtgactcaacaattaattagagctgcagaaatcagagcttctgctaatcttgctgctactaagatgtcagagtgtgtacttggacaatctaagagagttgatttctgtggaaagggctatcatcttatgtccttccctcagtcagcacctcatggtgtagtcttcttgcatgtgacttatgtccctgcacaagagaagaacttcacaactgctcctgccatttgtcatgatggtaaagcacactttcctcgtgaaggtgtctttgtttcaaatggcacacactggtttgtaacacaaaggaatttctatgaaccacaaatcattactacagacaacacatttgtgtctggtaactgtgatgttgtaataggaattgtcaacaacacagtttatgatcctttgcaacctgaattagactcattcaaggaggagttagataaatatttcaagaatcatacatcaccagatgttgatttaggtgacatctctggcattaatgcttcagttgtaaacattcagaaagaaattgaccgcctcaatgaggttgccaagaatttaaatgaatctctcatcgatctccaagaacttggaaagtatgagcagtatatcaaatggccatggtacatttggctaggtttcatagctggcttgattgccatagtaatggtgacaattatgctttgctgtatgaccagttgctgtagttgtctcaagggctgttgttcttgtggatcctgctgcaaatttgatgaagacgactctgagccagtgctcaaaggagtcaaattacattacacataa

SEQ ID NO: 12 - protein, 1273 aa, Artificial Sequence
  Wuhan-Hu-1 reference strain
  MISC_FEATURE (986)..(986): lysine
  MISC_FEATURE (987)..(987): valine
MFVFLVLLPLVSSQCVNLTTRTQLPPAYTNSFTRGVYYPDKVFRSSVLHSTQDLFLPFFSNVTWFHAIHVSGTNGTKRFDNPVLPFNDGVYFASTEKSNIIRGWIFGTTLDSKTQSLLIVNNATNVVIKVCEFQFCNDPFLGVYYHKNNKSWMESEFRVYSSANNCTFEYVSQPFLMDLEGKQGNFKNLREFVFKNIDGYFKIYSKHTPINLVRDLPQGFSALEPLVDLPIGINITRFQTLLALHRSYLTPGDSSSGWTAGAAAYYVGYLQPRTFLLKYNENGTITDAVDCALDPLSETKCTLKSFTVEKGIYQTSNFRVQPTESIVRFPNITNLCPFGEVFNATRFASVYAWNRKRISNCVADYSVLYNSASFSTFKCYGVSPTKLNDLCFTNVYADSFVIRGDEVRQIAPGQTGKIADYNYKLPDDFTGCVIAWNSNNLDSKVGGNYNYLYRLFRKSNLKPFERDISTEIYQAGSTPCNGVEGFNCYFPLQSYGFQPTNGVGYQPYRVVVLSFELLHAPATVCGPKKSTNLVKNKCVNFNFNGLTGTGVLTESNKKFLPFQQFGRDIADTTDAVRDPQTLEILDITPCSFGGVSVITPGTNTSNQVAVLYQDVNCTEVPVAIHADQLTPTWRVYSTGSNVFQTRAGCLIGAEHVNNSYECDIPIGAGICASYQTQTNSPRRARSVASQSIIAYTMSLGAENSVAYSNNSIAIPTNFTISVTTEILPVSMTKTSVDCTMYICGDSTECSNLLLQYGSFCTQLNRALTGIAVEQDKNTQEVFAQVKQIYKTPPIKDFGGFNFSQILPDPSKPSKRSFIEDLLFNKVTLADAGFIKQYGDCLGDIAARDLICAQKFNGLTVLPPLLTDEMIAQYTSALLAGTITSGWTFGAGAALQIPFAMQMAYRFNGIGVTQNVLYENQKLIANQFNSAIGKIQDSLSSTASALGKLQDVVNQNAQALNTLVKQLSSNFGAISSVLNDILSRLDPPEAEVQIDRLITGRLQSLQTYVTQQLIRAAEIRASANLAATKMSECVLGQSKRVDFCGKGYHLMSFPQSAPHGVVFLHVTYVPAQEKNFTTAPAICHDGKAHFPREGVFVSNGTHWFVTQRNFYEPQIITTDNTFVSGNCDVVIGIVNNTVYDPLQPELDSFKEELDKYFKNHTSPDVDLGDISGINASVVNIQKEIDRLNEVAKNLNESLIDLQELGKYEQYIKWPWYIWLGFIAGLIAIVMVTIMLCCMTSCCSCLKGCCSCGSCCKFDEDDSEPVLKGVKLHYT

SEQ ID NO: 13 - DNA, 3822 bp, Artificial Sequence
  Wuhan-Hu-1 reference strain
atgtttgtctttcttgtcttattgccactagtctctagtcagtgtgttaatcttacaaccagaactcaattaccacctgcatacactaattctttcacacgtggtgtttattaccctgacaaagtattcagatcctcagtattacattcaactcaggacttgttcttacctttcttctccaatgttacttggttccatgctatacatgtctctgggaccaatggtactaagaggtttgataaccctgtcctaccatttaatgatggtgtttatttcgcttccactgagaagtctaacataataagaggctggatatttggtactactttagattcgaagacccagtccctacttattgttaataacgctactaatgttgttattaaagtctgtgaatttcaattctgtaatgatccattcttgggtgtttattaccacaagaacaacaagagttggatggaaagtgagttcagagtttattctagtgcgaataattgcactttcgaatatgtctctcagcctttccttatggaccttgaaggtaaacagggtaatttcaagaatcttagggaatttgtgtttaagaatattgatggttatttcaagatatattctaagcacacgcctattaatttagtgcgtgatctccctcagggtttctcggctttagaaccattggtagatttgccaataggtattaacatcactaggtttcaaactttacttgctttacatagaagttatttgactcctggtgattcttcttcaggttggacagctggtgctgcagcttattatgtgggttatcttcaacctaggactttcctattgaaatataatgagaatggaaccattacagatgctgtagactgtgcacttgaccctctctcagaaacaaagtgtacgttgaaatccttcactgtagagaaaggaatctatcaaacttctaactttagagtccaaccaacagaatctattgttagatttcctaatattacaaacttgtgccctttcggtgaagtatttaacgccaccagatttgcatctgtttatgcttggaacaggaagagaatcagcaactgtgttgctgattattctgtcctatataattccgcatcattctccacatttaagtgttatggagtgtctcctactaaattaaatgatctctgctttactaatgtctatgcagattcatttgtaattagaggtgatgaagtcagacaaatcgctccagggcaaactggaaagattgctgattataattataaattaccagatgactttacaggctgcgttatagcttggaattctaacaatcttgattctaaggttggtggtaattataattacctgtatagattgtttaggaagtctaatctcaaacctttcgagagagatatttcaactgaaatctatcaggccggtagcacaccttgtaatggtgttgaaggatttaattgttactttcctttacaatcatatggtttccaacccactaatggtgttggttaccaaccatacagagtagtagtactttcatttgaacttctacatgcaccagcaactgtttgtggacctaagaagtctactaatttggttaagaacaaatgtgtcaatttcaacttcaatggtttaacaggcacaggtgttcttactgagtctaacaagaagtttctgcctttccaacaatttggcagagacattgctgacactactgatgctgtccgtgatccacagacacttgagattcttgacattacaccatgttcatttggtggtgtcagtgttataacaccaggaacaaatacttctaaccaggttgctgttctttatcaggatgttaactgcacagaagtccctgttgctattcatgcagatcaacttactcctacttggcgtgtttattctacaggttctaatgtatttcaaacacgtgcaggctgtttaataggagctgaacatgtcaacaactcatatgagtgtgacatacccattggtgcaggtatatgcgctagttatcagactcagactaattctcctggatcagcttcaagtgtagctagtcaatccatcattgcctacactatgtcacttggtgcagagaattcagttgcttactctaataactctattgccatacccacaaactttactattagtgttaccacagaaattctaccagtgtctatgaccaagacatcagtagattgtacaatgtacatttgtggtgattcaactgaatgcagcaatctattgttgcaatatggcagtttctgtacacaattaaaccgtgctttaactggaatagctgttgaacaagacaagaacacccaagaagtatttgcacaagtcaaacaaatttacaagacaccaccaattaaagatttcggtggatttaatttctcacaaatattaccagatccatctaaaccaagcaagaggtcatttattgaagatctactattcaacaaagtgacacttgcagatgctggcttcatcaaacaatatggtgattgccttggtgatattgctgctagagacctcatttgtgcacagaagtttaacggccttactgtattgccacctttgctcacagatgaaatgattgctcaatacacttctgcactgttagcgggtacaatcacttctggttggacctttggtgcaggtgctgcattacaaataccatttgctatgcaaatggcttataggtttaatggtattggagttacacagaatgttctctatgagaaccagaaattgattgccaaccaatttaatagtgctattggcaagattcaagactcactttcttccacagcaagtgcacttggtaaacttcaagatgtggtcaaccagaatgcacaagctttaaacacgcttgttaaacaacttagctccaactttggtgcaatttcaagtgtattaaatgatatcctttcacgtcttgacccacctgaggctgaagtgcaaattgataggttgatcacaggcagacttcaaagtttgcagacatatgtgactcaacaattaattagagctgcagaaatcagagcttctgctaatcttgctgctactaagatgtcagagtgtgtacttggacaatctaagagagttgatttctgtggaaagggctatcatcttatgtccttccctcagtcagcacctcatggtgtagtcttcttgcatgtgacttatgtccctgcacaagagaagaacttcacaactgctcctgccatttgtcatgatggtaaagcacactttcctcgtgaaggtgtctttgtttcaaatggcacacactggtttgtaacacaaaggaatttctatgaaccacaaatcattactacagacaacacatttgtgtctggtaactgtgatgttgtaataggaattgtcaacaacacagtttatgatcctttgcaacctgaattagactcattcaaggaggagttagataaatatttcaagaatcatacatcaccagatgttgatttaggtgacatctctggcattaatgcttcagttgtaaacattcagaaagaaattgaccgcctcaatgaggttgccaagaatttaaatgaatctctcatcgatctccaagaacttggaaagtatgagcagtatatcaaatggccatggtacatttggctaggtttcatagctggcttgattgccatagtaatggtgacaattatgctttgctgtatgaccagttgctgtagttgtctcaagggctgttgttcttgtggatcctgctgcaaatttgatgaagacgactctgagccagtgctcaaaggagtcaaattacattacacataa

SEQ ID NO: 14 - protein, 1273 aa, Artificial Sequence
  Wuhan-Hu-1 reference strain
  MISC_FEATURE (682)..(685): RRAR
  MISC_FEATURE (986)..(986): lysine
  MISC_FEATURE (987)..(987): valine
MFVFLVLLPLVSSQCVNLTTRTQLPPAYTNSFTRGVYYPDKVFRSSVLHSTQDLFLPFFSNVTWFHAIHVSGTNGTKRFDNPVLPFNDGVYFASTEKSNIIRGWIFGTTLDSKTQSLLIVNNATNVVIKVCEFQFCNDPFLGVYYHKNNKSWMESEFRVYSSANNCTFEYVSQPFLMDLEGKQGNFKNLREFVFKNIDGYFKIYSKHTPINLVRDLPQGFSALEPLVDLPIGINITRFQTLLALHRSYLTPGDSSSGWTAGAAAYYVGYLQPRTFLLKYNENGTITDAVDCALDPLSETKCTLKSFTVEKGIYQTSNFRVQPTESIVRFPNITNLCPFGEVFNATRFASVYAWNRKRISNCVADYSVLYNSASFSTFKCYGVSPTKLNDLCFTNVYADSFVIRGDEVRQIAPGQTGKIADYNYKLPDDFTGCVIAWNSNNLDSKVGGNYNYLYRLFRKSNLKPFERDISTEIYQAGSTPCNGVEGFNCYFPLQSYGFQPTNGVGYQPYRVVVLSFELLHAPATVCGPKKSTNLVKNKCVNFNFNGLTGTGVLTESNKKFLPFQQFGRDIADTTDAVRDPQTLEILDITPCSFGGVSVITPGTNTSNQVAVLYQDVNCTEVPVAIHADQLTPTWRVYSTGSNVFQTRAGCLIGAEHVNNSYECDIPIGAGICASYQTQTNSPGSASSVASQSIIAYTMSLGAENSVAYSNNSIAIPTNFTISVTTEILPVSMTKTSVDCTMYICGDSTECSNLLLQYGSFCTQLNRALTGIAVEQDKNTQEVFAQVKQIYKTPPIKDFGGFNFSQILPDPSKPSKRSFIEDLLFNKVTLADAGFIKQYGDCLGDIAARDLICAQKFNGLTVLPPLLTDEMIAQYTSALLAGTITSGWTFGAGAALQIPFAMQMAYRFNGIGVTQNVLYENQKLIANQFNSAIGKIQDSLSSTASALGKLQDVVNQNAQALNTLVKQLSSNFGAISSVLNDILSRLDPPEAEVQIDRLITGRLQSLQTYVTQQLIRAAEIRASANLAATKMSECVLGQSKRVDFCGKGYHLMSFPQSAPHGVVFLHVTYVPAQEKNFTTAPAICHDGKAHFPREGVFVSNGTHWFVTQRNFYEPQIITTDNTFVSGNCDVVIGIVNNTVYDPLQPELDSFKEELDKYFKNHTSPDVDLGDISGINASVVNIQKEIDRLNEVAKNLNESLIDLQELGKYEQYIKWPWYIWLGFIAGLIAIVMVTIMLCCMTSCCSCLKGCCSCGSCCKFDEDDSEPVLKGVKLHYT

SEQ ID NO: 15 - DNA, 3765 bp, Artificial Sequence
  Wuhan-Hu-1 reference strain
atgtttgtctttcttgtcttattgccactagtctctagtcagtgtgttaatcttacaaccagaactcaattaccacctgcatacactaattctttcacacgtggtgtttattaccctgacaaagtattcagatcctcagtattacattcaactcaggacttgttcttacctttcttctccaatgttacttggttccatgctatacatgtctctgggaccaatggtactaagaggtttgataaccctgtcctaccatttaatgatggtgtttatttcgcttccactgagaagtctaacataataagaggctggatatttggtactactttagattcgaagacccagtccctacttattgttaataacgctactaatgttgttattaaagtctgtgaatttcaattctgtaatgatccattcttgggtgtttattaccacaagaacaacaagagttggatggaaagtgagttcagagtttattctagtgcgaataattgcactttcgaatatgtctctcagcctttccttatggaccttgaaggtaaacagggtaatttcaagaatcttagggaatttgtgtttaagaatattgatggttatttcaagatatattctaagcacacgcctattaatttagtgcgtgatctccctcagggtttctcggctttagaaccattggtagatttgccaataggtattaacatcactaggtttcaaactttacttgctttacatagaagttatttgactcctggtgattcttcttcaggttggacagctggtgctgcagcttattatgtgggttatcttcaacctaggactttcctattgaaatataatgagaatggaaccattacagatgctgtagactgtgcacttgaccctctctcagaaacaaagtgtacgttgaaatccttcactgtagagaaaggaatctatcaaacttctaactttagagtccaaccaacagaatctattgttagatttcctaatattacaaacttgtgccctttcggtgaagtatttaacgccaccagatttgcatctgtttatgcttggaacaggaagagaatcagcaactgtgttgctgattattctgtcctatataattccgcatcattctccacatttaagtgttatggagtgtctcctactaaattaaatgatctctgctttactaatgtctatgcagattcatttgtaattagaggtgatgaagtcagacaaatcgctccagggcaaactggaaagattgctgattataattataaattaccagatgactttacaggctgcgttatagcttggaattctaacaatcttgattctaaggttggtggtaattataattacctgtatagattgtttaggaagtctaatctcaaacctttcgagagagatatttcaactgaaatctatcaggccggtagcacaccttgtaatggtgttgaaggatttaattgttactttcctttacaatcatatggtttccaacccactaatggtgttggttaccaaccatacagagtagtagtactttcatttgaacttctacatgcaccagcaactgtttgtggacctaagaagtctactaatttggttaagaacaaatgtgtcaatttcaacttcaatggtttaacaggcacaggtgttcttactgagtctaacaagaagtttctgcctttccaacaatttggcagagacattgctgacactactgatgctgtccgtgatccacagacacttgagattcttgacattacaccatgttcatttggtggtgtcagtgttataacaccaggaacaaatacttctaaccaggttgctgttctttatcaggatgttaactgcacagaagtccctgttgctattcatgcagatcaacttactcctacttggcgtgtttattctacaggttctaatgtatttcaaacacgtgcaggctgtttaataggagctgaacatgtcaacaactcatatgagtgtgacatacccattggtgcaggtatatgcgctagttatcagactcagactaattctcctggatcagcttcaagtgtagctagtcaatccatcattgcctacactatgtcacttggtgcagagaattcagttgcttactctaataactctattgccatacccacaaactttactattagtgttaccacagaaattctaccagtgtctatgaccaagacatcagtagattgtacaatgtacatttgtggtgattcaactgaatgcagcaatctattgttgcaatatggcagtttctgtacacaattaaaccgtgctttaactggaatagctgttgaacaagacaagaacacccaagaagtatttgcacaagtcaaacaaatttacaagacaccaccaattaaagatttcggtggatttaatttctcacaaatattaccagatccatctaaaccaagcaagaggtcatttattgaagatctactattcaacaaagtgacacttgcagatgctggcttcatcaaacaatatggtgattgccttggtgatattgctgctagagacctcatttgtgcacagaagtttaacggccttactgtattgccacctttgctcacagatgaaatgattgctcaatacacttctgcactgttagcgggtacaatcacttctggttggacctttggtgcaggtgctgcattacaaataccatttgctatgcaaatggcttataggtttaatggtattggagttacacagaatgttctctatgagaaccagaaattgattgccaaccaatttaatagtgctattggcaagattcaagactcactttcttccacagcaagtgcacttggtaaacttcaagatgtggtcaaccagaatgcacaagctttaaacacgcttgttaaacaacttagctccaactttggtgcaatttcaagtgtattaaatgatatcctttcacgtcttgacccacctgaggctgaagtgcaaattgataggttgatcacaggcagacttcaaagtttgcagacatatgtgactcaacaattaattagagctgcagaaatcagagcttctgctaatcttgctgctactaagatgtcagagtgtgtacttggacaatctaagagagttgatttctgtggaaagggctatcatcttatgtccttccctcagtcagcacctcatggtgtagtcttcttgcatgtgacttatgtccctgcacaagagaagaacttcacaactgctcctgccatttgtcatgatggtaaagcacactttcctcgtgaaggtgtctttgtttcaaatggcacacactggtttgtaacacaaaggaatttctatgaaccacaaatcattactacagacaacacatttgtgtctggtaactgtgatgttgtaataggaattgtcaacaacacagtttatgatcctttgcaacctgaattagactcattcaaggaggagttagataaatatttcaagaatcatacatcaccagatgttgatttaggtgacatctctggcattaatgcttcagttgtaaacattcagaaagaaattgaccgcctcaatgaggttgccaagaatttaaatgaatctctcatcgatctccaagaacttggaaagtatgagcagtatatcaaatggccatggtacatttggctaggtttcatagctggcttgattgccatagtaatggtgacaattatgctttgctgtatgaccagttgctgtagttgtctcaagggctgttgttcttgtggatcctgctgctaa

SEQ ID NO: 16 - protein, 1254 aa, Artificial Sequence
  Wuhan-Hu-1 reference strain
  MISC_FEATURE (682)..(684): RRAR
  MISC_FEATURE (986)..(986): lysine
  MISC_FEATURE (987)..(987): valine
MFVFLVLLPLVSSQCVNLTTRTQLPPAYTNSFTRGVYYPDKVFRSSVLHSTQDLFLPFFSNVTWFHAIHVSGTNGTKRFDNPVLPFNDGVYFASTEKSNIIRGWIFGTTLDSKTQSLLIVNNATNVVIKVCEFQFCNDPFLGVYYHKNNKSWMESEFRVYSSANNCTFEYVSQPFLMDLEGKQGNFKNLREFVFKNIDGYFKIYSKHTPINLVRDLPQGFSALEPLVDLPIGINITRFQTLLALHRSYLTPGDSSSGWTAGAAAYYVGYLQPRTFLLKYNENGTITDAVDCALDPLSETKCTLKSFTVEKGIYQTSNFRVQPTESIVRFPNITNLCPFGEVFNATRFASVYAWNRKRISNCVADYSVLYNSASFSTFKCYGVSPTKLNDLCFTNVYADSFVIRGDEVRQIAPGQTGKIADYNYKLPDDFTGCVIAWNSNNLDSKVGGNYNYLYRLFRKSNLKPFERDISTEIYQAGSTPCNGVEGFNCYFPLQSYGFQPTNGVGYQPYRVVVLSFELLHAPATVCGPKKSTNLVKNKCVNFNFNGLTGTGVLTESNKKFLPFQQFGRDIADTTDAVRDPQTLEILDITPCSFGGVSVITPGTNTSNQVAVLYQDVNCTEVPVAIHADQLTPTWRVYSTGSNVFQTRAGCLIGAEHVNNSYECDIPIGAGICASYQTQTNSPGSASSVASQSIIAYTMSLGAENSVAYSNNSIAIPTNFTISVTTEILPVSMTKTSVDCTMYICGDSTECSNLLLQYGSFCTQLNRALTGIAVEQDKNTQEVFAQVKQIYKTPPIKDFGGFNFSQILPDPSKPSKRSFIEDLLFNKVTLADAGFIKQYGDCLGDIAARDLICAQKFNGLTVLPPLLTDEMIAQYTSALLAGTITSGWTFGAGAALQIPFAMQMAYRFNGIGVTQNVLYENQKLIANQFNSAIGKIQDSLSSTASALGKLQDVVNQNAQALNTLVKQLSSNFGAISSVLNDILSRLDPPEAEVQIDRLITGRLQSLQTYVTQQLIRAAEIRASANLAATKMSECVLGQSKRVDFCGKGYHLMSFPQSAPHGVVFLHVTYVPAQEKNFTTAPAICHDGKAHFPREGVFVSNGTHWFVTQRNFYEPQIITTDNTFVSGNCDVVIGIVNNTVYDPLQPELDSFKEELDKYFKNHTSPDVDLGDISGINASVVNIQKEIDRLNEVAKNLNESLIDLQELGKYEQYIKWPWYIWLGFIAGLIAIVMVTIMLCCMTSCCSCLKGCCSCGSCC

SEQ ID NO: 17 - DNA, 3822 bp, Artificial Sequence
  SARS-CoV-2 S antigen
atgttcgtgttcctggtgctgctgccgctggtgagcagccagtgcgtgaacctgacgacccgtacacaactaccacctgcgtacacaaatagcttcaccagaggcgtgtactaccctgataaagtgttcagatcttctgtgctgcacagcacccaggatctgttcctgccgttcttctccaacgtgacctggttccatgccatccacgtgtctggaacaaacggcaccaagaggtttgacaaccctgtgctacccttcaatgacggcgtctactttgctagcaccgagaagagcaatatcatccgcggctggatcttcggcaccaccctggactccaagacccagtccctgctgattgtgaacaacgccaccaacgtggtgatcaaggtctgcgaattccagttctgtaacgacccattcctgggcgtgtattatcataagaacaataagagctggatggaatcagagttccgggtgtactcttctgccaacaactgcaccttcgagtacgtgtctcagcctttcctcatggacctggagggcaagcagggcaacttcaagaacctgagggagtttgtgttcaagaacatcgacgggtacttcaagatctacagcaagcacacacccatcaatctggtgcgagacctgcctcagggcttctcggctctggaacccttggtggatctgcccatcggcatcaacatcaccagattccagacactgctggctcttcacagaagctacctgacgcctggagatagcagcagcggctggaccgccggagccgccgcctattacgtgggctacctgcagcccagaacgttcctgcttaagtacaacgagaacggtacaattaccgatgccgtggactgcgccttagacccgctgagcgagacaaagtgtaccctgaagagctttacagtggagaaaggcatctaccagaccagtaacttcagagtgcagccaaccgaaagcatcgtgcggtttcctaatatcacaaacctgtgtccatttggcgaggtgttcaacgcgaccagattcgcgtctgtctatgcctggaacagaaagcggatcagcaactgcgtggctgactatagcgtgctttacaacagcgcctcctttagcaccttcaagtgctacggcgtcagtcccactaaactgaacgacctctgcttcaccaatgtgtacgcggatagcttcgtgatcagaggagacgaggtgcggcagattgcgcctggacagaccggcaagatcgccgactacaattacaagctgcctgacgacttcacaggctgcgtgatcgcctggaactctaacaatctggacagcaaagtcggtggaaattataactacctgtaccgcctattcagaaagtccaacctgaagccatttgaacgggacatctctaccgaaatctaccaggctggcagcactccttgtaatggcgtagagggcttcaactgttactttccactgcagagctacggcttccagcctaccaatggcgttggataccagccttacagagtggtggtgttgtcgtttgagctgcttcacgcacctgctacagtctgtggccctaagaaatctaccaatctggtaaagaacaagtgcgtgaatttcaactttaacggcctgaccggcacaggagtgctgactgagagcaataagaaattcctgcctttccagcagtttggcagagacatcgccgataccaccgacgccgtacgggatcctcagaccctggaaatcctggacatcacaccgtgtagcttcggcggagtcagcgtgatcacacctggaacaaacacatccaaccaggtggccgtgctgtaccaggacgtaaactgtacagaggtgccagtggccattcacgccgatcagctgacacctacctggcgggtttatagcacgggcagcaacgtcttccagacccgggccggctgcctgatcggcgctgaacacgtgaacaacagctacgagtgcgacatccctatcggagcgggcatctgcgccagctaccagacgcagacaaacagccctggctccgcctcttcggttgccagccagagtatcatcgcctacaccatgagtctgggagccgagaatagcgtggcctacagcaacaacagcatcgctattcccaccaatttcaccatcagcgtgaccaccgaaatcctgcctgtgagcatgaccaagaccagcgtagactgcaccatgtacatctgcggcgactcaaccgaatgtagcaacctgctgctccagtacggcagcttctgcacccagctgaacagagctctgacgggcatcgctgtggaacaagacaagaacacccaggaggtgttcgcccaagtgaaacagatctacaagactcctcctatcaaggacttcggaggcttcaatttctctcagatcttgccagatcctagcaagccaagcaagcggagcttcatcgaagaccttctgtttaacaaggtgacactggccgacgccgggttcatcaagcagtacggcgactgtctcggagacatcgctgccagagacctcatctgcgcccagaaattcaacggcctgactgtgctgcctcctctgctcacagacgagatgatcgcccagtacaccagcgccctcctggccggcaccatcaccagcggctggacgtttggtgctggtgccgccctgcagatccctttcgccatgcagatggcctatcgcttcaacggaatcggcgtgacacagaacgtgctgtacgagaaccagaagctgatcgccaaccagtttaacagcgctatcggcaagatccaagactctctgagttctacagcctctgccctgggcaaactgcaggacgtggtcaaccagaacgcccaggcgctgaataccctggtgaagcagctgagcagcaatttcggtgcgatcagcagcgtgctgaacgacatcctgagcagactggatccgcctgaggccgaagtccagatcgatagactgatcaccggcagactgcaatctctgcagacatacgtgacccagcagctgatccgggctgcggagatccgggccagcgctaacctggccgccaccaagatgagcgagtgcgtgctgggccagtctaagagggttgacttctgcggtaagggctaccacctgatgagcttcccacagtctgcgcctcacggcgttgtgttcctgcacgtgacctacgtgcctgctcaggagaagaacttcaccaccgcgccggccatctgccacgacggcaaggcccacttcccaagagagggtgtatttgtgtctaacggcacccactggttcgtgacacaaaggaacttctacgagcctcagatcataaccaccgacaacaccttcgtgagcggaaactgcgacgtggtgatcggcatcgtgaacaacaccgtgtacgaccctctgcagcctgagctggacagcttcaaagaagaactagacaagtacttcaagaaccacaccagtcccgatgtggacttgggcgatatctctggcattaacgccagcgtcgtgaacatccagaaggagatcgatagactgaacgaggtggccaagaacctgaacgaatcactgatcgacctgcaggagctgggaaagtacgagcagtacatcaagtggccctggtatatctggctgggcttcatcgctggactgatcgccatcgtgatggtgaccatcatgctgtgctgcatgacatcctgctgttcctgcctgaagggctgttgcagctgtggtagctgctgcaagttcgatgaggatgactcagagcctgtgctcaagggagtgaagctgcactacacctga

SEQ ID NO: 18 - DNA, 3822 bp, Artificial Sequence
  SARS-CoV-2 S antigen
atgtttgtattcttagtcttgttaccactagtgtcgtctcagtgcgtcaaccttaccacgcgtactcagctaccacctgcctacaccaatagtttcacgcgaggagtttattacccggataaggtcttcagatcgtcggtcctacacagtacgcaagacttgttccttcctttcttcagtaatgtaacatggttccacgctattcacgtttccggtacaaatggaacgaaacgtttcgataacccagtcttaccgttcaatgacggtgtatatttcgcatctacagagaagtcgaatataatccgtggatggatcttcggaaccactttagattccaagactcagtcgttgttgattgtcaacaatgcaacaaatgtcgtgatcaaagtttgtgagtttcaattctgtaatgacccattcttaggtgtgtactaccataagaataacaagtcatggatggaatcagaatttcgtgtctattcttcggcgaacaactgcactttcgagtatgtgagtcaacctttcctaatggacctagagggaaagcagggtaactttaagaatcttcgagaattcgtctttaagaatattgacggttacttcaagatctattccaagcacactcccataaacttggtccgagatctaccacagggtttctccgctctagaacccttagtggatcttcctataggaatcaacatcacgagattccagacattgttagcattgcatcgatcctatcttacgcctggagattcttcatcgggatggactgcaggagccgctgcgtactatgtgggatacttacagcctcgaacattcctacttaagtacaatgagaacggaactatcacagacgcggtggactgtgctttggacccattgtcggagacaaagtgtacccttaagtcattcactgtcgagaagggaatttatcaaacgtccaactttcgtgtgcagccaacagaatccatagtcagatttccaaacattacgaatctttgcccgttcggtgaagtctttaacgccacccgtttcgcatccgtttacgcctggaacagaaagagaatctcgaactgcgtggcggactattctgtactttataactcagcttcattctcaacattcaagtgttatggtgtgtcgccaacaaagctaaatgatctatgcttcaccaacgtatacgcggattcgttcgtaattagaggtgatgaggtgcgacagatcgctcctggacagacaggaaagatagctgattacaattacaagttaccggatgatttcaccggttgcgtgatcgcttggaattctaacaatttggactccaaagttggaggaaactacaactacttatatcgattatttagaaagtccaacttgaaacctttcgagcgtgacataagtacggagatctatcaggccggatcgacaccatgcaatggtgtggagggtttcaattgttactttccacttcaaagttacggattccaaccgacgaacggagtgggttaccagccgtatcgagtcgtagtcctatcatttgagttgctacatgctccagcgaccgtttgcggacctaagaagtccacgaacctagtaaagaacaaatgcgtcaatttcaacttcaacggtttgactggaactggagtgttaactgagtccaacaagaaatttctaccgttccaacaatttggtagagacattgcagacacgacggatgcggtacgtgaccctcaaactttagagatcttagacataacgccttgctccttcggaggagtttccgtgattacgcctggaaccaatacctcaaaccaagtcgctgtgctataccaggatgtgaactgcaccgaggttccagtagctattcacgctgatcagctaacgcctacttggagagtatattcgactggatctaacgtgttccagacacgagctggatgtcttattggtgcagagcatgtcaataactcttatgaatgtgatattccaattggtgcgggaatttgcgcatcataccagacacaaaccaacagtcccggatcagcttcatccgtcgcttcgcaatctatcattgcttacactatgagtctaggagctgagaactcagttgcgtacagtaacaacagtatcgctatacctactaactttacaataagtgtcaccactgaaatcttaccagtatccatgacgaagacctccgttgattgtacaatgtatatatgtggagattcaaccgagtgcagtaacttgttacttcagtatggatccttctgcacacaattgaatcgagcccttaccggtatcgccgtagaacaagataagaacacacaggaggtctttgctcaggtcaagcagatttacaagacaccgccaatcaaggacttcggtggattcaatttctctcagatccttcccgacccgtccaaaccgtctaaacgatcgtttatcgaagatttattgttcaataaggttactttggcggacgctggtttcattaagcagtatggagactgtcttggtgacattgctgcgcgtgaccttatatgcgcccagaagttcaatggacttacagttctaccgccacttctaaccgatgaaatgatcgcgcagtatacatctgcattgttggccggtacgattacatctggatggactttcggtgctggagcagctttgcaaattccgttcgcgatgcaaatggcatacagattcaacggaatcggagtaacgcagaatgtgctatatgagaaccagaaacttatagcaaaccaattcaactcggccatcggtaagattcaggattcgttgtcgagtacagccagtgcgcttggaaagctacaggacgtagttaatcagaatgcgcaagccttgaacacgttagttaagcaactatcttccaactttggtgccatttcttctgtgttgaacgacattctatctcgattagacccacctgaggccgaggttcaaattgatcgattaataaccggaagattgcagtcgctacaaacatatgtaactcagcaattaattagagctgcggaaattcgagcttctgcgaaccttgccgcgacgaagatgtcggaatgcgtgttaggtcagtcaaagcgagtggacttctgtggaaagggataccaccttatgtcctttccgcaatctgcgccacacggtgtggtgtttctacatgtgacctatgtacctgcacaagagaagaactttacgacagcaccagccatctgtcatgatggaaaggcccactttccacgagaaggagtatttgtgtccaatggtacacactggtttgttacccaacgaaatttctatgaaccgcagatcatcacaactgataacacgttcgtctctggaaactgtgacgtagttataggaattgtcaacaatactgtctacgacccattacagccggagcttgattcattcaaagaggagttggataagtacttcaagaaccacaccagtccggatgtggatttaggtgatatctccggtattaacgcttccgtcgttaatatacagaaggaaatcgaccgacttaatgaagtagcaaagaaccttaatgaatccctaatcgatctacaagaacttggtaaatatgagcaatatatcaagtggccttggtacatttggttgggtttcattgcaggattgattgcgattgttatggtcacaataatgctttgttgtatgacgagttgttgttcgtgtttgaagggatgctgctcatgtggttcttgttgtaaattcgatgaagacgattcagaaccggtattgaaaggagttaagttgcactacacgtaa

SEQ ID NO: 19 - DNA, 1260 bp, Artificial Sequence
  SARS-CoV-2 N antigen
atgtctgataatggcccgcagaatcagcgcaacgcacctagaatcacatttggcggtcccagcgactctaccggcagcaaccagaacggagaacggagcggagccagaagcaagcaaagacgccctcagggactgcctaacaacaccgccagctggttcactgctctgacccagcacggtaaagaggatctgaagtttcctagaggccaaggagttcctatcaacaccaacagcagcccagacgatcagatcggctactatagaagagccacaagaagaatccgaggcggcgacggcaagatgaaggacctgtcacctagatggtacttctactacctgggcacaggtcccgaagccgggctgccttatggcgcaaataaggacggaatcatctgggtggccacagaaggcgccctgaatacacccaaggaccacatcggcaccagaaacccggccaacaacgccgctatagtgctgcagctgccacagggtaccacgctgccaaagggcttctacgctgagggaagcagaggaggctctcaggcctcttccagaagctcttccagaagcagaaactccagcagaaatagcactcccggcagtagcagaggcacaagccctgctagaatggccggtaatggaggcgacgccgcgctggccctcctgctgctggatcggctgaaccagctggaatctaagatgagcggcaagggccagcaacagcagggccagacagtgaccaagaaatctgccgccgaggctagcaagaaacctcggcagaagaggaccgccaccaaggcctacaacgtgacacaggccttcggtcgtcgcggtcccgagcagacacagggcaacttcggcgaccaggagctgatcagacaaggcacagattacaaacattggcctcagatcgcccagttcgctccaagcgcctctgctttcttcggcatgagcagaatcggcatggaagtgacgccttcaggcacatggctgacctacaccggcgccatcaagctggacgataaggacccgaacttcaaggaccaggtgatcctgctgaacaagcacatcgacgcctacaagaccttccctcctacagagcctaagaaggacaagaagaagaaagccgatgaaacccaggccctgcctcagcggcagaagaagcaacagaccgtgaccctgctgcctgccgccgatctggacgacttcagcaaacaactgcagcaatccatgagctctgccgatagcacccaggcctga

SEQ ID NO: 20 - DNA, 1260 bp, Artificial Sequence
  SARS-CoV-2 N antigen
atgtcggataacggtccacagaaccaaagaaatgcacctcgaattacgtttggtggtccttccgactccactggatcgaatcagaatggtgagagaagtggtgcgagatctaaacaacgaagaccgcaaggtttgccgaacaatacagcctcgtggttcaccgcccttacacaacatggtaaagaggacctaaagtttcctcgtggacaaggtgtgcctatcaatacgaattcgagtccggatgatcagattggttattatcgacgagccacgagacgaattcgaggaggtgacggaaagatgaaggacttgtcaccacgttggtatttctactatttgggtacgggacctgaggccggacttccatatggagctaacaaggacggtatcatttgggtggcgaccgaaggagctcttaacacaccaaaggatcatataggtacgcgtaaccctgctaacaacgcagccattgtgttacagttaccacaaggtacgacacttcccaaaggattctatgcggaaggttcccgtggaggatcgcaggcctcgtcacgttcgtcctccagatcgagaaactcttcacgtaactctacgcctggtagttcccgaggaacgagtccggcaagaatggcaggtaatggaggtgatgctgccttagccctattactattagacagacttaatcaattagagagtaagatgtcaggaaagggtcagcaacaacaaggtcagacagtgacaaagaagtctgcggctgaggcatctaagaaaccgagacagaagagaacagctactaaggcgtacaacgtgactcaagcatttggtcgtcgtggaccggaacagactcagggtaactttggtgaccaagagttaatacgtcaaggaactgactacaagcactggcctcagatcgcacaattcgcaccgtcggcctcggctttcttcggaatgtcacgaataggtatggaggtaacaccctcgggaacgtggctaacgtacactggtgcgattaagcttgatgacaaggaccctaacttcaaagaccaagtcatcctacttaacaagcacatagacgcgtataagaccttccctccaactgaacccaagaaagataagaagaagaaagcagatgaaactcaagcattgcctcagcgtcagaagaagcaacagacggttacacttctacctgctgctgatcttgacgatttctcaaagcaattacaacagtcaatgagttcggctgactcaacccaggcttaa

SEQ ID NO: 21 - DNA, 2097 bp, Artificial Sequence
  Wuhan reference strain
atgtttgtctttcttgtcttattgccactagtctctagtcagtgtgttaatcttacaaccagaactcaattaccacctgcatacactaattctttcacacgtggtgtttattaccctgacaaagtattcagatcctcagtattacattcaactcaggacttgttcttacctttcttctccaatgttacttggttccatgctatacatgtctctgggaccaatggtactaagaggtttgataaccctgtcctaccatttaatgatggtgtttatttcgcttccactgagaagtctaacataataagaggctggatatttggtactactttagattcgaagacccagtccctacttattgttaataacgctactaatgttgttattaaagtctgtgaatttcaattctgtaatgatccattcttgggtgtttattaccacaagaacaacaagagttggatggaaagtgagttcagagtttattctagtgcgaataattgcactttcgaatatgtctctcagcctttccttatggaccttgaaggtaaacagggtaatttcaagaatcttagggaatttgtgtttaagaatattgatggttatttcaagatatattctaagcacacgcctattaatttagtgcgtgatctccctcagggtttctcggctttagaaccattggtagatttgccaataggtattaacatcactaggtttcaaactttacttgctttacatagaagttatttgactcctggtgattcttcttcaggttggacagctggtgctgcagcttattatgtgggttatcttcaacctaggactttcctattgaaatataatgagaatggaaccattacagatgctgtagactgtgcacttgaccctctctcagaaacaaagtgtacgttgaaatccttcactgtagagaaaggaatctatcaaacttctaactttagagtccaaccaacagaatctattgttagatttcctaatattacaaacttgtgccctttcggtgaagtatttaacgccaccagatttgcatctgtttatgcttggaacaggaagagaatcagcaactgtgttgctgattattctgtcctatataattccgcatcattctccacatttaagtgttatggagtgtctcctactaaattaaatgatctctgctttactaatgtctatgcagattcatttgtaattagaggtgatgaagtcagacaaatcgctccagggcaaactggaaagattgctgattataattataaattaccagatgactttacaggctgcgttatagcttggaattctaacaatcttgattctaaggttggtggtaattataattacctgtatagattgtttaggaagtctaatctcaaacctttcgagagagatatttcaactgaaatctatcaggccggtagcacaccttgtaatggtgttgaaggatttaattgttactttcctttacaatcatatggtttccaacccactaatggtgttggttaccaaccatacagagtagtagtactttcatttgaacttctacatgcaccagcaactgtttgtggacctaagaagtctactaatttggttaagaacaaatgtgtcaatttcaacttcaatggtttaacaggcacaggtgttcttactgagtctaacaagaagtttctgcctttccaacaatttggcagagacattgctgacactactgatgctgtccgtgatccacagacacttgagattcttgacattacaccatgttcatttggtggtgtcagtgttataacaccaggaacaaatacttctaaccaggttgctgttctttatcaggatgttaactgcacagaagtccctgttgctattcatgcagatcaacttactcctacttggcgtgtttattctacaggttctaatgtatttcaaacacgtgcaggctgtttaataggagctgaacatgtcaacaactcatatgagtgtgacatacccattggtgcaggtatatgcgctagttatcagactcagactaattctcctcggcgggcacgtagtgtagctagtcaatccatcattgcctacactatgtcataa

SEQ ID NO: 22 - protein, 698 aa, Artificial Sequence
  Wuhan reference strain
MFVFLVLLPLVSSQCVNLTTRTQLPPAYTNSFTRGVYYPDKVFRSSVLHSTQDLFLPFFSNVTWFHAIHVSGTNGTKRFDNPVLPFNDGVYFASTEKSNIIRGWIFGTTLDSKTQSLLIVNNATNVVIKVCEFQFCNDPFLGVYYHKNNKSWMESEFRVYSSANNCTFEYVSQPFLMDLEGKQGNFKNLREFVFKNIDGYFKIYSKHTPINLVRDLPQGFSALEPLVDLPIGINITRFQTLLALHRSYLTPGDSSSGWTAGAAAYYVGYLQPRTFLLKYNENGTITDAVDCALDPLSETKCTLKSFTVEKGIYQTSNFRVQPTESIVRFPNITNLCPFGEVFNATRFASVYAWNRKRISNCVADYSVLYNSASFSTFKCYGVSPTKLNDLCFTNVYADSFVIRGDEVRQIAPGQTGKIADYNYKLPDDFTGCVIAWNSNNLDSKVGGNYNYLYRLFRKSNLKPFERDISTEIYQAGSTPCNGVEGFNCYFPLQSYGFQPTNGVGYQPYRVVVLSFELLHAPATVCGPKKSTNLVKNKCVNFNFNGLTGTGVLTESNKKFLPFQQFGRDIADTTDAVRDPQTLEILDITPCSFGGVSVITPGTNTSNQVAVLYQDVNCTEVPVAIHADQLTPTWRVYSTGSNVFQTRAGCLIGAEHVNNSYECDIPIGAGICASYQTQTNSPRRARSVASQSIIAYTMS

SEQ ID NO: 23 - DNA, 2043 bp, Artificial Sequence
  Wuhan reference strain
atgtttgtctttcttgtcttattgccactagtctctagtcagtgtgttaatcttacaaccagaactcaattaccacctgcatacactaattctttcacacgtggtgtttattaccctgacaaagtattcagatcctcagtattacattcaactcaggacttgttcttacctttcttctccaatgttacttggttccatgctatacatgtctctgggaccaatggtactaagaggtttgataaccctgtcctaccatttaatgatggtgtttatttcgcttccactgagaagtctaacataataagaggctggatatttggtactactttagattcgaagacccagtccctacttattgttaataacgctactaatgttgttattaaagtctgtgaatttcaattctgtaatgatccattcttgggtgtttattaccacaagaacaacaagagttggatggaaagtgagttcagagtttattctagtgcgaataattgcactttcgaatatgtctctcagcctttccttatggaccttgaaggtaaacagggtaatttcaagaatcttagggaatttgtgtttaagaatattgatggttatttcaagatatattctaagcacacgcctattaatttagtgcgtgatctccctcagggtttctcggctttagaaccattggtagatttgccaataggtattaacatcactaggtttcaaactttacttgctttacatagaagttatttgactcctggtgattcttcttcaggttggacagctggtgctgcagcttattatgtgggttatcttcaacctaggactttcctattgaaatataatgagaatggaaccattacagatgctgtagactgtgcacttgaccctctctcagaaacaaagtgtacgttgaaatccttcactgtagagaaaggaatctatcaaacttctaactttagagtccaaccaacagaatctattgttagatttcctaatattacaaacttgtgccctttcggtgaagtatttaacgccaccagatttgcatctgtttatgcttggaacaggaagagaatcagcaactgtgttgctgattattctgtcctatataattccgcatcattctccacatttaagtgttatggagtgtctcctactaaattaaatgatctctgctttactaatgtctatgcagattcatttgtaattagaggtgatgaagtcagacaaatcgctccagggcaaactggaaagattgctgattataattataaattaccagatgactttacaggctgcgttatagcttggaattctaacaatcttgattctaaggttggtggtaattataattacctgtatagattgtttaggaagtctaatctcaaacctttcgagagagatatttcaactgaaatctatcaggccggtagcacaccttgtaatggtgttgaaggatttaattgttactttcctttacaatcatatggtttccaacccactaatggtgttggttaccaaccatacagagtagtagtactttcatttgaacttctacatgcaccagcaactgtttgtggacctaagaagtctactaatttggttaagaacaaatgtgtcaatttcaacttcaatggtttaacaggcacaggtgttcttactgagtctaacaagaagtttctgcctttccaacaatttggcagagacattgctgacactactgatgctgtccgtgatccacagacacttgagattcttgacattacaccatgttcatttggtggtgtcagtgttataacaccaggaacaaatacttctaaccaggttgctgttctttatcaggatgttaactgcacagaagtccctgttgctattcatgcagatcaacttactcctacttggcgtgtttattctacaggttctaatgtatttcaaacacgtgcaggctgtttaataggagctgaacatgtcaacaactcatatgagtgtgacatacccattggtgcaggtatatgcgctagttatcagactcagactaattcttaa

SEQ ID NO: 24 - protein, 680 aa, Artificial Sequence
  Wuhan reference strain
MFVFLVLLPLVSSQCVNLTTRTQLPPAYTNSFTRGVYYPDKVFRSSVLHSTQDLFLPFFSNVTWFHAIHVSGTNGTKRFDNPVLPFNDGVYFASTEKSNIIRGWIFGTTLDSKTQSLLIVNNATNVVIKVCEFQFCNDPFLGVYYHKNNKSWMESEFRVYSSANNCTFEYVSQPFLMDLEGKQGNFKNLREFVFKNIDGYFKIYSKHTPINLVRDLPQGFSALEPLVDLPIGINITRFQTLLALHRSYLTPGDSSSGWTAGAAAYYVGYLQPRTFLLKYNENGTITDAVDCALDPLSETKCTLKSFTVEKGIYQTSNFRVQPTESIVRFPNITNLCPFGEVFNATRFASVYAWNRKRISNCVADYSVLYNSASFSTFKCYGVSPTKLNDLCFTNVYADSFVIRGDEVRQIAPGQTGKIADYNYKLPDDFTGCVIAWNSNNLDSKVGGNYNYLYRLFRKSNLKPFERDISTEIYQAGSTPCNGVEGFNCYFPLQSYGFQPTNGVGYQPYRVVVLSFELLHAPATVCGPKKSTNLVKNKCVNFNFNGLTGTGVLTESNKKFLPFQQFGRDIADTTDAVRDPQTLEILDITPCSFGGVSVITPGTNTSNQVAVLYQDVNCTEVPVAIHADQLTPTWRVYSTGSNVFQTRAGCLIGAEHVNNSYECDIPIGAGICASYQTQTNS

SEQ ID NO: 25 - DNA, 621 bp, Artificial Sequence
  Wuhan reference strain
atgtttgtctttcttgtcttattgccactagtctctagtaatattacaaacttgtgccctttcggtgaagtatttaacgccaccagatttgcatctgtttatgcttggaacaggaagagaatcagcaactgtgttgctgattattctgtcctatataattccgcatcattctccacatttaagtgttatggagtgtctcctactaaattaaatgatctctgctttactaatgtctatgcagattcatttgtaattagaggtgatgaagtcagacaaatcgctccagggcaaactggaaagattgctgattataattataaattaccagatgactttacaggctgcgttatagcttggaattctaacaatcttgattctaaggttggtggtaattataattacctgtatagattgtttaggaagtctaatctcaaacctttcgagagagatatttcaactgaaatctatcaggccggtagcacaccttgtaatggtgttgaaggatttaattgttactttcctttacaatcatatggtttccaacccactaatggtgttggttaccaaccatacagagtagtagtactttcatttgaacttctacatgcaccagcaactgtt

SEQ ID NO: 26 - protein, 207 aa, Artificial Sequence
  Wuhan reference strain
MFVFLVLLPLVSSNITNLCPFGEVFNATRFASVYAWNRKRISNCVADYSVLYNSASFSTFKCYGVSPTKLNDLCFTNVYADSFVIRGDEVRQIAPGQTGKIADYNYKLPDDFTGCVIAWNSNNLDSKVGGNYNYLYRLFRKSNLKPFERDISTEIYQAGSTPCNGVEGFNCYFPLQSYGFQPTNGVGYQPYRVVVLSFELLHAPATV

SEQ ID NO: 27 - DNA, 708 bp, Artificial Sequence
  Wuhan reference strain
atgtttgtctttcttgtcttattgccactagtctctagtagagtccaaccaacagaatctattgttagatttcctaatattacaaacttgtgccctttcggtgaagtatttaacgccaccagatttgcatctgtttatgcttggaacaggaagagaatcagcaactgtgttgctgattattctgtcctatataattccgcatcattctccacatttaagtgttatggagtgtctcctactaaattaaatgatctctgctttactaatgtctatgcagattcatttgtaattagaggtgatgaagtcagacaaatcgctccagggcaaactggaaagattgctgattataattataaattaccagatgactttacaggctgcgttatagcttggaattctaacaatcttgattctaaggttggtggtaattataattacctgtatagattgtttaggaagtctaatctcaaacctttcgagagagatatttcaactgaaatctatcaggccggtagcacaccttgtaatggtgttgaaggatttaattgttactttcctttacaatcatatggtttccaacccactaatggtgttggttaccaaccatacagagtagtagtactttcatttgaacttctacatgcaccagcaactgtttgtggacctaagaagtctactaatttggttaagaacaaatgtgtcaatttc

SEQ ID NO: 28 - protein, 235 aa, Artificial Sequence
  Wuhan reference strain
MFVFLVLLPLVSSRVQPTESIVRFPNITNLCPFGEVFNATRFASVYAWNRKRISNCVADYSVLYNSASFSTFKCYGVSPTKLNDLCFTNVYADSFVIRGDEVRQIAPGQTGKIADYNYKLPDDFTGCVIAWNSNNLDSKVGGNYNYLYRLFRKSNLKPFERDISTIYQAGSTPCNGVEGFNCYFPLQSYGFQPTNGVGYQPYRVVVLSFELLHAPATVCGPKKSTNLVKNKCVNF

SEQ ID NO: 29 - DNA, 3813 bp, Artificial Sequence
  Wuhan-Hu-1 reference strain
atgtttgtctttcttgtcttattgccactagtctctagtcagtgtgttaactttacaaccagaactcaattaccacctgcatacactaattctttcacacgtggtgtttattaccctgacaaagtattcagatcctcagtattacattcaactcaggacttgttcttacctttcttctccaatgttacttggttccatgctatacatgtctctgggaccaatggtactaagaggtttgctaaccctgtcctaccatttaatgatggtgtttatttcgcttccactgagaagtctaacataataagaggctggatatttggtactactttagattcgaagacccagtccctacttattgttaataacgctactaatgttgttattaaagtctgtgaatttcaattctgtaatgatccattcttgggtgtttattaccacaagaacaacaagagttggatggaaagtgagttcagagtttattctagtgcgaataattgcactttcgaatatgtctctcagcctttccttatggaccttgaaggtaaacagggtaatttcaagaatcttagggaatttgtgtttaagaatattgatggttatttcaagatatattctaagcacacgcctattaatttagtgcgtggtctccctcagggtttctcggctttagaaccattggtagatttgccaataggtattaacatcactaggtttcaaactttacatataagttatttgactcctggtgattcttcttcaggttggacagctggtgctgcagcttattatgtgggttatcttcaacctaggactttcctattgaaatataatgagaatggaaccattacagatgctgtagactgtgcacttgaccctctctcagaaacaaagtgtacgttgaaatccttcactgtagagaaaggaatctatcaaacttctaactttagagtccaaccaacagaatctattgttagatttcctaatattacaaacttgtgccctttcggtgaagtatttaacgccaccagatttgcatctgtttatgcttggaacaggaagagaatcagcaactgtgttgctgattattctgtcctatataattccgcatcattctccacatttaagtgttatggagtgtctcctactaaattaaatgatctctgctttactaatgtctatgcagattcatttgtaattagaggtgatgaagtcagacaaatcgctccagggcaaactggaaatattgctgattataattataaattaccagatgactttacaggctgcgttatagcttggaattctaacaatcttgattctaaggttggtggtaattataattacctgtatagattgtttaggaagtctaatctcaaacctttcgagagagatatttcaactgaaatctatcaggccggtagcacaccttgtaatggtgttaaaggatttaattgttactttcctttacaatcatatggtttccaacccacttatggtgttggttaccaaccatacagagtagtagtactttcatttgaacttctacatgcaccagcaactgtttgtggacctaagaagtctactaatttggttaagaacaaatgtgtcaatttcaacttcaatggtttaacaggcacaggtgttcttactgagtctaacaagaagtttctgcctttccaacaatttggcagagacattgctgacactactgatgctgtccgtgatccacagacacttgagattcttgacattacaccatgttcatttggtggtgtcagtgttataacaccaggaacaaatacttctaaccaggttgctgttctttatcagggtgttaactgcacagaagtccctgttgctattcatgcagatcaacttactcctacttggcgtgtttattctacaggttctaatgtatttcaaacacgtgcaggctgtttaataggagctgaacatgtcaacaactcatatgagtgtgacatacccattggtgcaggtatatgcgctagttatcagactcagactaattctcctcggcgggcacgtagtgtagctagtcaatccatcattgcctacactatgtcacttggtgtagagaattcagttgcttactctaataactctattgccatacccacaaactttactattagtgttaccacagaaattctaccagtgtctatgaccaagacatcagtagattgtacaatgtacatttgtggtgattcaactgaatgcagcaatctattgttgcaatatggcagtttctgtacacaattaaaccgtgctttaactggaatagctgttgaacaagacaagaacacccaagaagtatttgcacaagtcaaacaaatttacaagacaccaccaattaaagatttcggtggatttaatttctcacaaatattaccagatccatctaaaccaagcaagaggtcatttattgaagatctactattcaacaaagtgacacttgcagatgctggcttcatcaaacaatatggtgattgccttggtgatattgctgctagagacctcatttgtgcacagaagtttaacggccttactgtattgccacctttgctcacagatgaaatgattgctcaatacacttctgcactgttagcgggtacaatcacttctggttggacctttggtgcaggtgctgcattacaaataccatttgctatgcaaatggcttataggtttaatggtattggagttacacagaatgttctctatgagaaccagaaattgattgccaaccaatttaatagtgctattggcaagattcaagactcactttcttccacagcaagtgcacttggtaaacttcaagatgtggtcaaccagaatgcacaagctttaaacacgcttgttaaacaacttagctccaactttggtgcaatttcaagtgtattaaatgatatcctttcacgtcttgacaaagttgaggctgaagtgcaaattgataggttgatcacaggcagacttcaaagtttgcagacatatgtgactcaacaattaattagagctgcagaaatcagagcttctgctaatcttgctgctactaagatgtcagagtgtgtacttggacaatctaagagagttgatttctgtggaaagggctatcatcttatgtccttccctcagtcagcacctcatggtgtagtcttcttgcatgtgacttatgtccctgcacaagagaagaacttcacaactgctcctgccatttgtcatgatggtaaagcacactttcctcgtgaaggtgtctttgtttcaaatggcacacactggtttgtaacacaaaggaatttctatgaaccacaaatcattactacagacaacacatttgtgtctggtaactgtgatgttgtaataggaattgtcaacaacacagtttatgatcctttgcaacctgaattagactcattcaaggaggagttagataaatatttcaagaatcatacatcaccagatgttgatttaggtgacatctctggcattaatgcttcagttgtaaacattcagaaagaaattgaccgcctcaatgaggttgccaagaatttaaatgaatctctcatcgatctccaagaacttggaaagtatgagcagtatatcaaatggccatggtacatttggctaggtttcatagctggcttgattgccatagtaatggtgacaattatgctttgctgtatgaccagttgctgtagttgtctcaagggctgttgttcttgtggatcctgctgcaaatttgatgaagacgactctgagccagtgctcaaaggagtcaaattacattacacataa

SEQ ID NO: 30 - protein, 1270 aa, Artificial Sequence
  Wuhan-Hu-1 reference strain
MFVFLVLLPLVSSQCVNFTTRTQLPPAYTNSFTRGVYYPDKVFRSSVLHSTQDLFLPFFSNVTWFHAIHVSGTNGTKRFANPVLPFNDGVYFASTEKSNIIRGWIFGTTLDSKTQSLLIVNNATNVVIKVCEFQFCNDPFLGVYYHKNNKSWMESEFRVYSSANNCTFEYVSQPFLMDLEGKQGNFKNLREFVFKNIDGYFKIYSKHTPINLVRGLPQGFSALEPLVDLPIGINITRFQTLHISYLTPGDSSSGWTAGAAAYYVGYLQPRTFLLKYNENGTITDAVDCALDPLSETKCTLKSFTVEKGIYQTSNFRVQPTESIVRFPNITNLCPFGEVFNATRFASVYAWNRKRISNCVADYSVLYNSASFSTFKCYGVSPTKLNDLCFTNVYADSFVIRGDEVRQIAPGQTGNIADYNYKLPDDFTGCVIAWNSNNLDSKVGGNYNYLYRLFRKSNLKPFERDISTEIYQAGSTPCNGVKGFNCYFPLQSYGFQPTYGVGYQPYRVVVLSFELLHAPATVCGPKKSTNLVKNKCVNFNFNGLTGTGVLTESNKKFLPFQQFGRDIADTTDAVRDPQTLEILDITPCSFGGVSVITPGTNTSNQVAVLYQGVNCTEVPVAIHADQLTPTWRVYSTGSNVFQTRAGCLIGAEHVNNSYECDIPIGAGICASYQTQTNSPRRARSVASQSIIAYTMSLGVENSVAYSNNSIAIPTNFTISVTTEILPVSMTKTSVDCTMYICGDSTECSNLLLQYGSFCTQLNRALTGIAVEQDKNTQEVFAQVKQIYKTPPIKDFGGFNFSQILPDPSKPSKRSFIEDLLFNKVTLADAGFIKQYGDCLGDIAARDLICAQKFNGLTVLPPLLTDEMIAQYTSALLAGTITSGWTFGAGAALQIPFAMQMAYRFNGIGVTQNVLYENQKLIANQFNSAIGKIQDSLSSTASALGKLQDVVNQNAQALNTLVKQLSSNFGAISSVLNDILSRLDKVEAEVQIDRLITGRLQSLQTYVTQQLIRAAEIRASANLAATKMSECVLGQSKRVDFCGKGYHLMSFPQSAPHGVVFLHVTYVPAQEKNFTTAPAICHDGKAHFPREGVFVSNGTHWFVTQRNFYEPQIITTDNTFVSGNCDVVIGIVNNTVYDPLQPELDSFKEELDKYFKNHTSPDVDLGDISGINASVVNIQKEIDRLNEVAKNLNESLIDLQELGKYEQYIKWPWYIWLGFIAGLIAIVMVTIMLCCMTSCCSCLKGCCSCGSCCKFDEDDSEPVLKGVKLHYT

SEQ ID NO: 31 - DNA, 3813 bp, Artificial Sequence
  Wuhan-Hu-1 reference strain
atgtttgtctttcttgtcttattgccactagtctctagtcagtgtgttaatcttacaaccagaactcaattaccacctgcatacactaattctttcacacgtggtgtttattaccctgacaaagtattcagatcctcagtattacattcaactcaggacttgttcttacctttcttctccaatgttacttggttccatgctatatctgggaccaatggtactaagaggtttgataaccctgtcctaccatttaatgatggtgtttatttcgcttccactgagaagtctaacataataagaggctggatatttggtactactttagattcgaagacccagtccctacttattgttaataacgctactaatgttgttattaaagtctgtgaatttcaattctgtaatgatccattcttgggtgtttaccacaagaacaacaagagttggatggaaagtgagttcagagtttattctagtgcgaataattgcactttcgaatatgtctctcagcctttccttatggaccttgaaggtaaacagggtaatttcaagaatcttagggaatttgtgtttaagaatattgatggttatttcaagatatattctaagcacacgcctattaatttagtgcgtgatctccctcagggtttctcggctttagaaccattggtagatttgccaataggtattaacatcactaggtttcaaactttacttgctttacatagaagttatttgactcctggtgattcttcttcaggttggacagctggtgctgcagcttattatgtgggttatcttcaacctaggactttcctattgaaatataatgagaatggaaccattacagatgctgtagactgtgcacttgaccctctctcagaaacaaagtgtacgttgaaatccttcactgtagagaaaggaatctatcaaacttctaactttagagtccaaccaacagaatctattgttagatttcctaatattacaaacttgtgccctttcggtgaagtatttaacgccaccagatttgcatctgtttatgcttggaacaggaagagaatcagcaactgtgttgctgattattctgtcctatataattccgcatcattctccacatttaagtgttatggagtgtctcctactaaattaaatgatctctgctttactaatgtctatgcagattcatttgtaattagaggtgatgaagtcagacaaatcgctccagggcaaactggaaagattgctgattataattataaattaccagatgactttacaggctgcgttatagcttggaattctaacaatcttgattctaaggttggtggtaattataattacctgtatagattgtttaggaagtctaatctcaaacctttcgagagagatatttcaactgaaatctatcaggccggtagcacaccttgtaatggtgttgaaggatttaattgttactttcctttacaatcatatggtttccaacccacttatggtgttggttaccaaccatacagagtagtagtactttcatttgaacttctacatgcaccagcaactgtttgtggacctaagaagtctactaatttggttaagaacaaatgtgtcaatttcaacttcaatggtttaacaggcacaggtgttcttactgagtctaacaagaagtttctgcctttccaacaatttggcagagacattgatgacactactgatgctgtccgtgatccacagacacttgagattcttgacattacaccatgttcatttggtggtgtcagtgttataacaccaggaacaaatacttctaaccaggttgctgttctttatcagggtgttaactgcacagaagtccctgttgctattcatgcagatcaacttactcctacttggcgtgtttattctacaggttctaatgtatttcaaacacgtgcaggctgtttaataggagctgaacatgtcaacaactcatatgagtgtgacatacccattggtgcaggtatatgcgctagttatcagactcagactaattctcatcggcgggcacgtagtgtagctagtcaatccatcattgcctacactatgtcacttggtgcagagaattcagttgcttactctaataactctattgccatacccataaactttactattagtgttaccacagaaattctaccagtgtctatgaccaagacatcagtagattgtacaatgtacatttgtggtgattcaactgaatgcagcaatctattgttgcaatatggcagtttctgtacacaattaaaccgtgctttaactggaatagctgttgaacaagacaagaacacccaagaagtatttgcacaagtcaaacaaatttacaagacaccaccaattaaagatttcggtggatttaatttctcacaaatattaccagatccatctaaaccaagcaagaggtcatttattgaagatctactattcaacaaagtgacacttgcagatgctggcttcatcaaacaatatggtgattgccttggtgatattgctgctagagacctcatttgtgcacagaagtttaacggccttactgtattgccacctttgctcacagatgaaatgattgctcaatacacttctgcactgttagcgggtacaatcacttctggttggacctttggtgcaggtgctgcattacaaataccatttgctatgcaaatggcttataggtttaatggtattggagttacacagaatgttctctatgagaaccagaaattgattgccaaccaatttaatagtgctattggcaagattcaagactcactttcttccacagcaagtgcacttggtaaacttcaagatgtggtcaaccagaatgcacaagctttaaacacgcttgttaaacaacttagctccaactttggtgcaatttcaagtgtattaaatgatatccttgcacgtcttgacaaagttgaggctgaagtgcaaattgataggttgatcacaggcagacttcaaagtttgcagacatatgtgactcaacaattaattagagctgcagaaatcagagcttctgctaatcttgctgctactaagatgtcagagtgtgtacttggacaatctaagagagttgatttctgtggaaagggctatcatcttatgtccttccctcagtcagcacctcatggtgtagtcttcttgcatgtgacttatgtccctgcacaagagaagaacttcacaactgctcctgccatttgtcatgatggtaaagcacactttcctcgtgaaggtgtctttgtttcaaatggcacacactggtttgtaacacaaaggaatttctatgaaccacaaatcattactacacacaacacatttgtgtctggtaactgtgatgttgtaataggaattgtcaacaacacagtttatgatcctttgcaacctgaattagactcattcaaggaggagttagataaatatttcaagaatcatacatcaccagatgttgatttaggtgacatctctggcattaatgcttcagttgtaaacattcagaaagaaattgaccgcctcaatgaggttgccaagaatttaaatgaatctctcatcgatctccaagaacttggaaagtatgagcagtatatcaaatggccatggtacatttggctaggtttcatagctggcttgattgccatagtaatggtgacaattatgctttgctgtatgaccagttgctgtagttgtctcaagggctgttgttcttgtggatcctgctgcaaatttgatgaagacgactctgagccagtgctcaaaggagtcaaattacattacacataa

SEQ ID NO: 32 - protein, 1270 aa, Artificial Sequence
  Wuhan-Hu-1 reference strain
MFVFLVLLPLVSSQCVNLTTRTQLPPAYTNSFTRGVYYPDKVFRSSVLHSTQDLFLPFFSNVTWFHAISGTNGTKRFDNPVLPFNDGVYFASTEKSNIIRGWIFGTTLDSKTQSLLIVNNATNVVIKVCEFQFCNDPFLGVYHKNNKSWMESEFRVYSSANNCTFEYVSQPFLMDLEGKQGNFKNLREFVFKNIDGYFKIYSKHTPINLVRDLPQGFSALEPLVDLPIGINITRFQTLLALHRSYLTPGDSSSGWTAGAAAYYVGYLQPRTFLLKYNENGTITDAVDCALDPLSETKCTLKSFTVEKGIYQTSNFRVQPTESIVRFPNITNLCPFGEVFNATRFASVYAWNRKRISNCVADYSVLYNSASFSTFKCYGVSPTKLNDLCFTNVYADSFVIRGDEVRQIAPGQTGKIADYNYKLPDDFTGCVIAWNSNNLDSKVGGNYNYLYRLFRKSNLKPFERDISTEIYQAGSTPCNGVEGFNCYFPLQSYGFQPTYGVGYQPYRVVVLSFELLHAPATVCGPKKSTNLVKNKCVNFNFNGLTGTGVLTESNKKFLPFQQFGRDIDDTTDAVRDPQTLEILDITPCSFGGVSVITPGTNTSNQVAVLYQGVNCTEVPVAIHADQLTPTWRVYSTGSNVFQTRAGCLIGAEHVNNSYECDIPIGAGICASYQTQTNSHRRARSVASQSIIAYTMSLGAENSVAYSNNSIAIPINFTISVTTEILPVSMTKTSVDCTMYICGDSTECSNLLLQYGSFCTQLNRALTGIAVEQDKNTQEVFAQVKQIYKTPPIKDFGGFNFSQILPDPSKPSKRSFIEDLLFNKVTLADAGFIKQYGDCLGDIAARDLICAQKFNGLTVLPPLLTDEMIAQYTSALLAGTITSGWTFGAGAALQIPFAMQMAYRFNGIGVTQNVLYENQKLIANQFNSAIGKIQDSLSSTASALGKLQDVVNQNAQALNTLVKQLSSNFGAISSVLNDILARLDKVEAEVQIDRLITGRLQSLQTYVTQQLIRAAEIRASANLAATKMSECVLGQSKRVDFCGKGYHLMSFPQSAPHGVVFLHVTYVPAQEKNFTTAPAICHDGKAHFPREGVFVSNGTHWFVTQRNFYEPQIITTHNTFVSGNCDVVIGIVNNTVYDPLQPELDSFKEELDKYFKNHTSPDVDLGDISGINASVVNIQKEIDRLNEVAKNLNESLIDLQELGKYEQYIKWPWYIWLGFIAGLIAIVMVTIMLCCMTSCCSCLKGCCSCGSCCKFDEDDSEPVLKGVKLHYT

SEQ ID NO: 33 - DNA, 3822 bp, Artificial Sequence
  Wuhan-Hu-1 reference strain
atgtttgtctttcttgtcttattgccactagtctctattcagtgtgttaatcttacaaccagaactcaattaccacctgcatacactaattctttcacacgtggtgtttattaccctgacaaagtattcagatcctcagtattacattcaactcaggacttgttcttacctttcttctccaatgttacttggttccatgctatacatgtctctgggaccaatggtactaagaggtttgataaccctgtcctaccatttaatgatggtgtttatttcgcttccactgagaagtctaacataataagaggctggatatttggtactactttagattcgaagacccagtccctacttattgttaataacgctactaatgttgttattaaagtctgtgaatttcaattctgtaatgatccattcttgggtgtttattaccacaagaacaacaagagttgcatggaaagtgagttcagagtttattctagtgcgaataattgcactttcgaatatgtctctcagcctttccttatggaccttgaaggtaaacagggtaatttcaagaatcttagggaatttgtgtttaagaatattgatggttatttcaagatatattctaagcacacgcctattaatttagtgcgtgatctccctcagggtttctcggctttagaaccattggtagatttgccaataggtattaacatcactaggtttcaaactttacttgctttacatagaagttatttgactcctggtgattcttcttcaggttggacagctggtgctgcagcttattatgtgggttatcttcaacctaggactttcctattgaaatataatgagaatggaaccattacagatgctgtagactgtgcacttgaccctctctcagaaacaaagtgtacgttgaaatccttcactgtagagaaaggaatctatcaaacttctaactttagagtccaaccaacagaatctattgttagatttcctaatattacaaacttgtgccctttcggtgaagtatttaacgccaccagatttgcatctgtttatgcttggaacaggaagagaatcagcaactgtgttgctgattattctgtcctatataattccgcatcattctccacatttaagtgttatggagtgtctcctactaaattaaatgatctctgctttactaatgtctatgcagattcatttgtaattagaggtgatgaagtcagacaaatcgctccagggcaaactggaaagattgctgattataattataaattaccagatgactttacaggctgcgttatagcttggaattctaacaatcttgattctaaggttggtggtaattataattaccggtatagattgtttaggaagtctaatctcaaacctttcgagagagatatttcaactgaaatctatcaggccggtagcacaccttgtaatggtgttgaaggatttaattgttactttcctttacaatcatatggtttccaacccactaatggtgttggttaccaaccatacagagtagtagtactttcatttgaacttctacatgcaccagcaactgtttgtggacctaagaagtctactaatttggttaagaacaaatgtgtcaatttcaacttcaatggtttaacaggcacaggtgttcttactgagtctaacaagaagtttctgcctttccaacaatttggcagagacattgctgacactactgatgctgtccgtgatccacagacacttgagattcttgacattacaccatgttcatttggtggtgtcagtgttataacaccaggaacaaatacttctaaccaggttgctgttctttatcagggtgttaactgcacagaagtccctgttgctattcatgcagatcaacttactcctacttggcgtgtttattctacaggttctaatgtatttcaaacacgtgcaggctgtttaataggagctgaacatgtcaacaactcatatgagtgtgacatacccattggtgcaggtatatgcgctagttatcagactcagactaattctcctcggcgggcacgtagtgtagctagtcaatccatcattgcctacactatgtcacttggtgcagagaattcagttgcttactctaataactctattgccatacccacaaactttactattagtgttaccacagaaattctaccagtgtctatgaccaagacatcagtagattgtacaatgtacatttgtggtgattcaactgaatgcagcaatctattgttgcaatatggcagtttctgtacacaattaaaccgtgctttaactggaatagctgttgaacaagacaagaacacccaagaagtatttgcacaagtcaaacaaatttacaagacaccaccaattaaagatttcggtggatttaatttctcacaaatattaccagatccatctaaaccaagcaagaggtcatttattgaagatctactattcaacaaagtgacacttgcagatgctggcttcatcaaacaatatggtgattgccttggtgatattgctgctagagacctcatttgtgcacagaagtttaacggccttactgtattgccacctttgctcacagatgaaatgattgctcaatacacttctgcactgttagcgggtacaatcacttctggttggacctttggtgcaggtgctgcattacaaataccatttgctatgcaaatggcttataggtttaatggtattggagttacacagaatgttctctatgagaaccagaaattgattgccaaccaatttaatagtgctattggcaagattcaagactcactttcttccacagcaagtgcacttggtaaacttcaagatgtggtcaaccagaatgcacaagctttaaacacgcttgttaaacaacttagctccaactttggtgcaatttcaagtgtattaaatgatatcctttcacgtcttgacaaagttgaggctgaagtgcaaattgataggttgatcacaggcagacttcaaagtttgcagacatatgtgactcaacaattaattagagctgcagaaatcagagcttctgctaatcttgctgctactaagatgtcagagtgtgtacttggacaatctaagagagttgatttctgtggaaagggctatcatcttatgtccttccctcagtcagcacctcatggtgtagtcttcttgcatgtgacttatgtccctgcacaagagaagaacttcacaactgctcctgccatttgtcatgatggtaaagcacactttcctcgtgaaggtgtctttgtttcaaatggcacacactggtttgtaacacaaaggaatttctatgaaccacaaatcattactacagacaacacatttgtgtctggtaactgtgatgttgtaataggaattgtcaacaacacagtttatgatcctttgcaacctgaattagactcattcaaggaggagttagataaatatttcaagaatcatacatcaccagatgttgatttaggtgacatctctggcattaatgcttcagttgtaaacattcagaaagaaattgaccgcctcaatgaggttgccaagaatttaaatgaatctctcatcgatctccaagaacttggaaagtatgagcagtatatcaaatggccatggtacatttggctaggtttcatagctggcttgattgccatagtaatggtgacaattatgctttgctgtatgaccagttgctgtagttgtctcaagggctgttgttcttgtggatcctgctgcaaatttgatgaagacgactctgagccagtgctcaaaggagtcaaattacattacacataa

SEQ ID NO: 34 - protein, 1273 aa, Artificial Sequence
  Wuhan-Hu-1 reference strain
MFVFLVLLPLVSIQCVNLTTRTQLPPAYTNSFTRGVYYPDKVFRSSVLHSTQDLFLPFFSNVTWFHAIHVSGTNGTKRFDNPVLPFNDGVYFASTEKSNIIRGWIFGTTLDSKTQSLLIVNNATNVVIKVCEFQFCNDPFLGVYYHKNNKSCMESEFRVYSSANNCTFEYVSQPFLMDLEGKQGNFKNLREFVFKNIDGYFKIYSKHTPINLVRDLPQGFSALEPLVDLPIGINITRFQTLLALHRSYLTPGDSSSGWTAGAAAYYVGYLQPRTFLLKYNENGTITDAVDCALDPLSETKCTLKSFTVEKGIYQTSNFRVQPTESIVRFPNITNLCPFGEVFNATRFASVYAWNRKRISNCVADYSVLYNSASFSTFKCYGVSPTKLNDLCFTNVYADSFVIRGDEVRQIAPGQTGKIADYNYKLPDDFTGCVIAWNSNNLDSKVGGNYNYRYRLFRKSNLKPFERDISTEIYQAGSTPCNGVEGFNCYFPLQSYGFQPTNGVGYQPYRVVVLSFELLHAPATVCGPKKSTNLVKNKCVNFNFNGLTGTGVLTESNKKFLPFQQFGRDIADTTDAVRDPQTLEILDITPCSFGGVSVITPGTNTSNQVAVLYQGVNCTEVPVAIHADQLTPTWRVYSTGSNVFQTRAGCLIGAEHVNNSYECDIPIGAGICASYQTQTNSPRRARSVASQSIIAYTMSLGAENSVAYSNNSIAIPTNFTISVTTEILPVSMTKTSVDCTMYICGDSTECSNLLLQYGSFCTQLNRALTGIAVEQDKNTQEVFAQVKQIYKTPPIKDFGGFNFSQILPDPSKPSKRSFIEDLLFNKVTLADAGFIKQYGDCLGDIAARDLICAQKFNGLTVLPPLLTDEMIAQYTSALLAGTITSGWTFGAGAALQIPFAMQMAYRFNGIGVTQNVLYENQKLIANQFNSAIGKIQDSLSSTASALGKLQDVVNQNAQALNTLVKQLSSNFGAISSVLNDILSRLDKVEAEVQIDRLITGRLQSLQTYVTQQLIRAAEIRASANLAATKMSECVLGQSKRVDFCGKGYHLMSFPQSAPHGVVFLHVTYVPAQEKNFTTAPAICHDGKAHFPREGVFVSNGTHWFVTQRNFYEPQIITTDNTFVSGNCDVVIGIVNNTVYDPLQPELDSFKEELDKYFKNHTSPDVDLGDISGINASVVNIQKEIDRLNEVAKNLNESLIDLQELGKYEQYIKWPWYIWLGFIAGLIAIVMVTIMLCCMTSCCSCLKGCCSCGSCCKFDEDDSEPVLKGVKLHYT

SEQ ID NO: 35 - DNA, 3822 bp, Artificial Sequence
  Wuhan-Hu-1 reference strain
atgtttgtctttcttgtcttattgccactagtctctagtcagtgtgttaactttacaaacagaactcaattaccatctgcatacactaattctttcacacgtggtgtttattaccctgacaaagtattcagatcctcagtattacattcaactcaggacttgttcttacctttcttctccaatgttacttggttccatgctatacatgtctctgggaccaatggtactaagaggtttgataaccctgtcctaccatttaatgatggtgtttatttcgcttccactgagaagtctaacataataagaggctggatatttggtactactttagattcgaagacccagtccctacttattgttaataacgctactaatgttgttattaaagtctgtgaatttcaattctgtaattatccattcttgggtgtttattaccacaagaacaacaagagttggatggaaagtgagttcagagtttattctagtgcgaataattgcactttcgaatatgtctctcagcctttccttatggaccttgaaggtaaacagggtaatttcaagaatcttagcgaatttgtgtttaagaatattgatggttatttcaagatatattctaagcacacgcctattaatttagtgcgtgatctccctcagggtttctcggctttagaaccattggtagatttgccaataggtattaacatcactaggtttcaaactttacttgctttacatagaagttatttgactcctggtgattcttcttcaggttggacagctggtgctgcagcttattatgtgggttatcttcaacctaggactttcctattgaaatataatgagaatggaaccattacagatgctgtagactgtgcacttgaccctctctcagaaacaaagtgtacgttgaaatccttcactgtagagaaaggaatctatcaaacttctaactttagagtccaaccaacagaatctattgttagatttcctaatattacaaacttgtgccctttcggtgaagtatttaacgccaccagatttgcatctgtttatgcttggaacaggaagagaatcagcaactgtgttgctgattattctgtcctatataattccgcatcattctccacatttaagtgttatggagtgtctcctactaaattaaatgatctctgctttactaatgtctatgcagattcatttgtaattagaggtgatgaagtcagacaaatcgctccagggcaaactggaacgattgctgattataattataaattaccagatgactttacaggctgcgttatagcttggaattctaacaatcttgattctaaggttggtggtaattataattacctgtatagattgtttaggaagtctaatctcaaacctttcgagagagatatttcaactgaaatctatcaggccggtagcacaccttgtaatggtgttaaaggatttaattgttactttcctttacaatcatatggtttccaacccacttatggtgttggttaccaaccatacagagtagtagtactttcatttgaacttctacatgcaccagcaactgtttgtggacctaagaagtctactaatttggttaagaacaaatgtgtcaatttcaacttcaatggtttaacaggcacaggtgttcttactgagtctaacaagaagtttctgcctttccaacaatttggcagagacattgctgacactactgatgctgtccgtgatccacagacacttgagattcttgacattacaccatgttcatttggtggtgtcagtgttataacaccaggaacaaatacttctaaccaggttgctgttctttatcagggtgttaactgcacagaagtccctgttgctattcatgcagatcaacttactcctacttggcgtgtttattctacaggttctaatgtatttcaaacacgtgcaggctgtttaataggagctgaatatgtcaacaactcatatgagtgtgacatacccattggtgcaggtatatgcgctagttatcagactcagactaattctcctcggcgggcacgtagtgtagctagtcaatccatcattgcctacactatgtcacttggtgcagagaattcagttgcttactctaataactctattgccatacccacaaactttactattagtgttaccacagaaattctaccagtgtctatgaccaagacatcagtagattgtacaatgtacatttgtggtgattcaactgaatgcagcaatctattgttgcaatatggcagtttctgtacacaattaaaccgtgctttaactggaatagctgttgaacaagacaagaacacccaagaagtatttgcacaagtcaaacaaatttacaagacaccaccaattaaagatttcggtggatttaatttctcacaaatattaccagatccatctaaaccaagcaagaggtcatttattgaagatctactattcaacaaagtgacacttgcagatgctggcttcatcaaacaatatggtgattgccttggtgatattgctgctagagacctcatttgtgcacagaagtttaacggccttactgtattgccacctttgctcacagatgaaatgattgctcaatacacttctgcactgttagcgggtacaatcacttctggttggacctttggtgcaggtgctgcattacaaataccatttgctatgcaaatggcttataggtttaatggtattggagttacacagaatgttctctatgagaaccagaaattgattgccaaccaatttaatagtgctattggcaagattcaagactcactttcttccacagcaagtgcacttggtaaacttcaagatgtggtcaaccagaatgcacaagctttaaacacgcttgttaaacaacttagctccaactttggtgcaatttcaagtgtattaaatgatatcctttcacgtcttgacaaagttgaggctgaagtgcaaattgataggttgatcacaggcagacttcaaagtttgcagacatatgtgactcaacaattaattagagctgcagaaatcagagcttctgctaatcttgctgctattaagatgtcagagtgtgtacttggacaatctaagagagttgatttctgtggaaagggctatcatcttatgtccttccctcagtcagcacctcatggtgtagtcttcttgcatgtgacttatgtccctgcacaagagaagaacttcacaactgctcctgccatttgtcatgatggtaaagcacactttcctcgtgaaggtgtctttgtttcaaatggcacacactggtttgtaacacaaaggaatttctatgaaccacaaatcattactacagacaacacatttgtgtctggtaactgtgatgttgtaataggaattgtcaacaacacagtttatgatcctttgcaacctgaattagactcattcaaggaggagttagataaatatttcaagaatcatacatcaccagatgttgatttaggtgacatctctggcattaatgcttcatttgtaaacattcagaaagaaattgaccgcctcaatgaggttgccaagaatttaaatgaatctctcatcgatctccaagaacttggaaagtatgagcagtatatcaaatggccatggtacatttggctaggtttcatagctggcttgattgccatagtaatggtgacaattatgctttgctgtatgaccagttgctgtagttgtctcaagggctgttgttcttgtggatcctgctgcaaatttgatgaagacgactctgagccagtgctcaaaggagtcaaattacattacacataa

SEQ ID NO: 36 - protein, 1273 aa, Artificial Sequence
  Wuhan-Hu-1 reference strain
MFVFLVLLPLVSSQCVNFTNRTQLPSAYTNSFTRGVYYPDKVFRSSVLHSTQDLFLPFFSNVTWFHAIHVSGTNGTKRFDNPVLPFNDGVYFASTEKSNIIRGWIFGTTLDSKTQSLLIVNNATNVVIKVCEFQFCNYPFLGVYYHKNNKSWMESEFRVYSSANNCTFEYVSQPFLMDLEGKQGNFKNLSEFVFKNIDGYFKIYSKHTPINLVRDLPQGFSALEPLVDLPIGINITRFQTLLALHRSYLTPGDSSSGWTAGAAAYYVGYLQPRTFLLKYNENGTITDAVDCALDPLSETKCTLKSFTVEKGIYQTSNFRVQPTESIVRFPNITNLCPFGEVFNATRFASVYAWNRKRISNCVADYSVLYNSASFSTFKCYGVSPTKLNDLCFTNVYADSFVIRGDEVRQIAPGQTGTIADYNYKLPDDFTGCVIAWNSNNLDSKVGGNYNYLYRLFRKSNLKPFERDISTEIYQAGSTPCNGVKGFNCYFPLQSYGFQPTYGVGYQPYRVVVLSFELLHAPATVCGPKKSTNLVKNKCVNFNFNGLTGTGVLTESNKKFLPFQQFGRDIADTTDAVRDPQTLEILDITPCSFGGVSVITPGTNTSNQVAVLYQGVNCTEVPVAIHADQLTPTWRVYSTGSNVFQTRAGCLIGAEYVNNSYECDIPIGAGICASYQTQTNSPRRARSVASQSIIAYTMSLGAENSVAYSNNSIAIPTNFTISVTTEILPVSMTKTSVDCTMYICGDSTECSNLLLQYGSFCTQLNRALTGIAVEQDKNTQEVFAQVKQIYKTPPIKDFGGFNFSQILPDPSKPSKRSFIEDLLFNKVTLADAGFIKQYGDCLGDIAARDLICAQKFNGLTVLPPLLTDEMIAQYTSALLAGTITSGWTFGAGAALQIPFAMQMAYRFNGIGVTQNVLYENQKLIANQFNSAIGKIQDSLSSTASALGKLQDVVNQNAQALNTLVKQLSSNFGAISSVLNDILSRLDKVEAEVQIDRLITGRLQSLQTYVTQQLIRAAEIRASANLAAIKMSECVLGQSKRVDFCGKGYHLMSFPQSAPHGVVFLHVTYVPAQEKNFTTAPAICHDGKAHFPREGVFVSNGTHWFVTQRNFYEPQIITTDNTFVSGNCDVVIGIVNNTVYDPLQPELDSFKEELDKYFKNHTSPDVDLGDISGINASFVNIQKEIDRLNEVAKNLNESLIDLQELGKYEQYIKWPWYIWLGFIAGLIAIVMVTIMLCCMTSCCSCLKGCCSCGSCCKFDEDDSEPVLKGVKLHYT

SEQ ID NO: 37 - DNA, 3822 bp, Artificial Sequence
  Wuhan-Hu-1 reference strain
atgtttgtcttcttggtccttctgccgcttgtttcttcacaatgtgtgaatttgaccacccgcacccagctgcctcctgcatatacgaattcattcactcgcggcgtgtactatccagataaagtctttcgatccagtgtactgcattcaacgcaagatctctttcttccattcttcagcaatgtgacctggttccacgcgatacacgtaagcggaaccaacggaacaaagagatttgacaatccagtactcccgtttaatgacggtgtctactttgcctctaccgagaagtctaatatcataagagggtggatcttcggtacgacgctcgattctaagacgcaaagcctgcttattgttaataatgccaccaatgtcgtgattaaggtatgcgaatttcaattctgtaacgatccattccttggagtttactatcataagaacaacaaatcctggatggaatcagagtttcgggtctacagctccgcaaataactgtacgtttgagtacgtgtcccagccctttcttatggatctcgaaggtaaacaaggcaatttcaagaatcttagagaattcgtcttcaagaacatcgatggatactttaagatatactcaaagcatacgccgataaacctcgtgcgcgacctgccacagggattcagtgcgcttgagccattggtagatcttcctataggaatcaacataactagatttcagacactgctggcgcttcatagatcctatctgactccaggtgactcctccagtggatggactgccggcgccgcggcttactacgtgggttatcttcagcctcgaacgtttcttctgaagtataacgagaacgggacgataaccgatgcggtggattgcgcactggaccctcttagcgaaactaaatgtacccttaagagctttacggttgagaagggtatttatcagactagtaactttcgcgtgcagcccacggaatcaattgtgcggtttcccaatattacaaacttgtgccctttcggcgaggtcttcaatgcaacgcgctttgcgtcagtttacgcctggaataggaagaggatatcaaactgcgtggctgactattctgtgctttacaactctgctagtttcagtacctttaagtgttacggtgtgagtccgacgaagctcaatgatctttgtttcactaatgtatacgcggacagtttcgttatacgaggagacgaggtccggcaaatcgcacccggccaaacgggaaagattgctgactacaactacaaattgcccgatgactttacgggatgcgtcattgcatggaattctaataatctggatagcaaagtaggtggaaactataattatctctaccggctcttccgaaagagtaatctcaaaccgtttgaaagagatattagcacggaaatatatcaagccggctccacaccatgtaatggagttgaaggctttaattgttatttcccgttgcaaagttacggatttcagcccacgaacggtgtgggttatcaaccgtatcgggtcgtagttctcagcttcgagctgcttcatgcgcccgcgactgtttgcggtcctaagaagtcaaccaatctcgtaaagaacaagtgtgtgaacttcaacttcaatggactcacagggacgggcgtgcttacggagtcaaacaagaagtttcttcctttccagcaattcggcagggacattgccgatacaacggacgcagttagggaccctcaaactcttgaaatcttggacataactccttgcagctttggcggcgtgagtgtgataacacctggtaccaatacgtccaatcaggtagcagtactgtatcaggatgtcaattgcaccgaagtccctgtcgccattcatgccgaccaactgacgccaacatggcgagtatacagtaccgggtcaaacgtgttccagaccagggcaggctgtctcattggtgcggaacacgttaacaacagttacgaatgcgatatacctattggtgctggcatctgtgcctcttaccagacccaaactaactcaccacgaagggcaagatcagttgccagtcagtctattatcgcttacacgatgtcactgggagctgagaactctgttgcttactcaaataattcaattgccatcccaacgaatttcactattagtgtaacaacggaaattctgcccgtgtccatgaccaagacgtccgtcgattgtaccatgtacatatgcggtgacagcaccgaatgtagcaacctcctgctccaatatggtagcttctgcacacagctcaacagagcacttacaggtatcgccgtagagcaagacaagaacacacaagaagtgttcgctcaggtgaagcagatctacaagactccaccgataaaggacttcggtggctttaactttagccaaatcctgcccgacccttctaagccttctaagagatcctttattgaggatctcttgttcaacaaagtcaccctcgctgacgcagggtttataaagcagtatggtgactgtctcggcgatatagcagccagagacttgatctgcgcccagaagttcaacgggcttacggttcttccgccgctgcttactgatgaaatgatagctcaatacacatctgctcttctcgctgggacaataacttccgggtggacgttcggagcgggtgccgccttgcaaattccctttgcgatgcagatggcttatcgcttcaatggcataggcgttacccagaacgtgctgtacgagaatcagaaattgatcgccaaccagtttaattctgccatcggaaagatccaagattccctgtctagcactgcgtcagccctcggtaaactgcaggatgtggttaatcagaatgctcaggctctcaacactctggttaaacagctgtctagcaacttcggtgccatctcttcagttcttaacgatatattgagtaggcttgataaagtcgaggcagaggttcaaattgaccggttgatcacgggcaggcttcaatcactgcaaacctacgtcactcaacaactgattcgcgcagcggaaatacgagcttcagctaatctcgcagcgactaagatgtccgagtgtgtgctcggtcagagcaagagagttgacttctgtgggaaagggtaccatctcatgtcatttcctcaatctgcaccgcacggagtagtattcctccacgttacttatgtgccggcacaagagaagaacttcactactgcgccagccatttgtcacgacgggaaagcgcactttcccagggaaggagtcttcgtatcaaacggtacgcattggttcgtaacgcaaagaaacttctatgaaccacaaattatcacgacggataatacgtttgtctccgggaactgtgacgtggtaattggtattgtaaataacacagtttatgacccattgcaacctgaactggacagcttcaaggaggaattggacaagtatttcaagaaccataccagtccggacgtagacctcggcgatatctcaggaattaacgctagcgtggtgaatattcagaaagaaatagatcgcctgaacgaagtagcgaagaaccttaacgaaagtttgattgatcttcaggagctgggtaaatacgagcaatacataaagtggccgtggtacatctggctcggctttatagctggcctgatcgccattgtgatggtgactattatgttgtgttgcatgactagctgctgttcatgtcttaagggatgctgcagctgcggtagctgctgtaaatttgacgaagacgatagcgagccggtactgaaaggtgtgaaacttcattacacataa

SEQ ID NO: 38 - DNA, 3813 bp, Artificial Sequence
  B.1.351 variant
atgttcgtgtttcttgtgttgttgccactggtttcatcccaatgtgtgaactttaccaccaggacgcagttgccaccagcttatactaattccttcactagaggagtgtactacccggacaaggtattccggtctagtgtccttcactccacgcaagacctgttccttccgttcttctccaatgtaacctggtttcacgccattcatgtttcaggcacgaatggcactaagcgcttcgccaacccagtactgccgtttaatgatggagtctacttcgcttcaacagagaagagcaatatcatacgaggctggatctttggtactaccttggattccaagacgcaatcccttcttattgtcaataatgcgaccaacgttgtaatcaaagtatgcgagtttcaattctgcaacgacccattcttgggcgtctattatcataagaataataagtcttggatggagtctgagttcagagtgtattcatcagcgaacaattgcacattcgaatatgtatctcagccctttctcatggatctcgaagggaagcaagggaacttcaagaatctccgcgagttcgtctttaagaacattgacggctatttcaagatatacagcaaacatactccaatcaacctggttcgaggactccctcagggcttctccgcgctggaacccttggtggacctcccaataggcataaatatcacgaggttccaaacattgcacataagctatctgactccgggagacagttccagcggttggactgcaggcgcggctgcgtactacgtgggctacttgcaacctaggacgtttctcttgaaatacaatgagaacggcaccatcacggatgcagttgactgtgctctcgacccactctccgaaaccaagtgtacgctcaagtcatttaccgtcgagaaaggaatctaccaaactagtaatttccgcgttcagcctacagagtcaattgtgcgatttcctaacatcactaacctgtgcccgtttggagaagtatttaatgcgactcgcttcgctagtgtctatgcgtggaatcgaaagcggatctcaaactgtgtggcagattattccgtcctgtataatagtgccagcttctcaacgtttaaatgctacggagttagcccaacgaagctgaacgacttgtgctttacgaacgtgtatgccgattccttcgtcatccgcggagacgaagttcgccaaatcgcaccaggtcaaacgggtaatatagcggactacaactacaagctgcccgacgatttcactgggtgcgtgatcgcgtggaatagtaacaacttggactccaaagtgggtggcaactacaactatctgtataggctgtttcgaaagtccaacttgaaaccgtttgaaagggatattagtacagagatctatcaagctggtagcacaccctgcaacggtgttaaaggctttaactgctactttcctttgcagagctatggatttcagcctacttatggagtcggttaccaaccttatcgcgtcgtagtactgagtttcgaactccttcatgcacccgcaactgtgtgcgggccaaagaagtctaccaatttggtcaagaataagtgtgtaaacttcaacttcaacggtctcacagggaccggtgtattgacagagtcaaacaagaagttcttgccctttcaacagttcggcagggatattgctgacactaccgatgcggttagggaccctcaaaccctggagattcttgacattacaccgtgcagcttcggtggagtcagcgttatcacaccaggcactaatacgtccaatcaagttgctgtactgtaccaaggagtcaattgtaccgaggtaccagtagcgattcacgccgaccaactcacgcccacatggcgcgtctatagcacaggcagcaatgtatttcaaacgcgcgcaggatgtctcattggagcggagcatgtcaataactcatacgaatgtgacattccaataggagcgggtatttgtgccagctaccagacgcaaacgaattctccacgccgagccagatcagtcgcgagtcagagtataatagcgtacacgatgtctctgggcgtcgagaattccgtcgcatactcaaacaattccattgcgatcccaacgaacttcacaatatccgtcaccactgaaatcctccctgttagcatgactaagacaagcgtggactgcactatgtatatttgtggtgattccacggaatgctctaatctgcttctccaatatggaagtttctgcacccaactgaacagggcgcttacaggcatagcagttgaacaagacaagaatacccaagaggtctttgcccaggtgaaacaaatttataagactcctccgatcaaggactttggagggttcaacttctcccagatacttcccgacccgagcaagccctccaagagatcgtttatagaagatctcctctttaacaaggtcacgttggctgatgccggctttattaaacaatacggtgactgtctcggagatatcgcggctagagacctgatatgtgcacagaaatttaacgggctcaccgtattgccaccgctgctgacggatgaaatgatcgcccaatacacctccgcgttgttggccgggaccattacttctggttggacatttggtgcaggagccgcacttcagataccatttgctatgcaaatggcgtatcgattcaacgggattggtgttacgcagaatgtcctctatgagaaccagaaactgatagcgaatcagttcaacagcgctattggcaagatccaagattctttgtcatcaaccgcgagtgccctgggtaaactgcaagatgtagtcaaccagaacgcacaagcccttaatacccttgtcaagcagctctcatccaactttggtgctatttcttctgttctgaatgatattctcagtcgactggacaaggtagaagcagaggttcagatagatcgcctcattactgggcgccttcagtcacttcagacttatgttacccaacaactcattagggcagccgaaatccgagcttcagcgaatctcgccgctactaagatgagcgagtgcgtacttggtcaatccaagagagtagatttctgtgggaagggatatcacctgatgtctttcccacagagcgcgccacacggtgtagtattcttgcatgttacatacgttccagcacaagagaagaactttactacagcaccggcaatctgccatgatgggaaggcacactttccgagggagggagtctttgtatccaatggcacccactggtttgttactcaaagaaatttctatgagccacagatcattactacggacaacacctttgtaagcgggaactgtgacgtagtcataggcatagtaaataataccgtttacgatccactgcagccggagctcgattcattcaaagaggaactggacaaatacttcaagaaccacacgtcacctgacgttgaccttggtgatatttctggcataaacgcctctgttgtgaatatccagaaggagatagacagactgaacgaggtggcaaagaatctgaacgaatcattgatcgatttgcaagagttgggaaagtacgaacagtatataaagtggccgtggtatatatggctagggttcattgctggacttatagcaattgtgatggtaacgatcatgttgtgttgcatgacttcctgctgcagttgcctcaaaggatgttgttcctgtggatcatgctgtaagtttgatgaagatgactccgaacccgtgcttaaaggagtgaagttgcactatacttaa

SEQ ID NO: 39 - DNA, 3813 bp, Artificial Sequence
  B.1.1.7 variant
atgtttgtctttctcgtacttctgcctctggtcagcagccaatgtgtgaacctcacaaccaggactcaattgccgccagcgtatacgaacagcttcacgcgcggcgtttattatccggataaggtattccgcagcagtgtgcttcatagtacacaggacctattcttgccgttcttctcaaacgtgacatggttccatgccattagtggcacaaacgggacaaagcggttcgacaacccggttcttccctttaatgacggagtatactttgcaagcacggagaagagcaacatcattagagggtggatctttgggaccacattggattccaagacgcagtccctgctgatagtcaacaacgctaccaacgtcgtcatcaaggtttgtgaattccaattctgcaacgatccgtttctgggagtttatcacaagaacaataaatcttggatggagagtgaatttcgcgtttactcatccgcaaataattgtaccttcgagtacgtgtcccagcctttcctcatggacttggagggtaagcagggaaactttaagaatctgagagaatttgtctttaagaacattgacgggtacttcaagatatactcaaagcatacacccattaacctggtgagggatttgccgcagggattctcagcactggagccactcgttgatctgccgatagggataaatatcacgcggttccaaactcttcttgctttgcaccgctcttaccttactccaggagactcttcctctgggtggacggctggagcggctgcttattacgtcgggtacttgcagccgcggaccttccttctgaaatacaatgagaacggtacaattactgacgctgtggattgcgccctggatccgctgtctgagacgaaatgcacgcttaagtcatttacggtcgagaagggaatctatcagacatccaactttcgagtgcagcccacagaatccatagttcgattccctaacatcactaatttgtgtccatttggtgaagtgtttaacgcgaccaggttcgccagcgtttatgcatggaatagaaagcggatcagtaattgcgtggccgattattctgtcctgtataattcagcatccttctctactttcaagtgttatggtgtttcaccaaccaaattgaacgatctctgcttcactaatgtttatgcagacagctttgtgatacgaggagatgaggtcagacagattgctcccgggcaaacgggaaagattgctgattataactacaagctgcctgacgactttacgggctgtgtcatagcgtggaacagcaataacctcgatagtaaggtaggcggtaattacaactacctgtatagactgtttcggaagtccaatctgaagcctttcgaacgcgatattagtaccgagatctatcaggcaggttccacaccttgcaatggagtggagggctttaattgctatttccctctgcaatcctacggattccaaccaacctatggcgttggctaccagccttatcgggtggtcgtgctttcctttgaacttcttcacgcacccgctactgtatgtggccctaagaagagcactaaccttgtgaagaacaaatgcgtcaatttcaactttaatgggctgaccggaaccggagtcctcacagagagcaacaagaaattccttccgtttcagcagttcggtagggatatagatgacacgactgatgcggtccgggatcctcaaacgcttgagattcttgacatcacgccgtgcagctttggtggagttagtgtaattactccgggtaccaatactagcaaccaagttgccgtactttatcaaggtgtaaactgcactgaagtaccggtcgccattcatgcagaccagctcacaccaacgtggagggtttattccactggatccaatgtctttcaaacaagagcgggctgtttgattggagcggaacatgttaacaacagttacgagtgtgacatacctataggagctggcatctgtgcgagctaccagacacaaaccaactctcatagacgggcacgctccgtggcatctcagtctatcatagcgtatacgatgagtttgggagcagagaattctgttgcatactctaacaatagtatcgccattccgattaactttaccatctcagtaacgaccgaaatacttcccgtctctatgactaagacaagtgtggactgcaccatgtacatttgcggtgactctaccgagtgctctaatttgctattgcaatatgggtcattctgtactcagctgaatagggccttgactgggatagccgtcgaacaagacaagaatacgcaggaggtattcgcccaagtaaagcaaatatataagacacctcccatcaaagactttggagggttcaatttcagtcagatcctacccgatccaagtaagccatcaaagaggagcttcatcgaggatctgctattcaataaggttaccctcgctgacgctggcttcatcaagcagtatggagattgcctcggcgacatagcagcacgagatcttatttgtgcacagaaatttaatggactcaccgttctcccacctctcctcacagacgaaatgatcgcacagtacacttctgccctcctcgccgggacgattactagcggctggacatttggcgctggtgctgctctgcagattccatttgctatgcagatggcttatcgctttaacgggatcggagtcacgcagaatgttctttacgagaaccagaaacttattgcgaaccagttcaactctgcgattgggaagatacaggatagcctttcctctactgcctctgcacttggtaagttgcaagacgttgtgaaccagaatgctcaagcattgaacacactggtgaagcagcttagttctaacttcggtgctatcagtagtgttctcaatgatatcctggctcggctcgacaaggtggaggccgaagtacaaatcgatagactcataaccggaagactgcaatccttgcagacatacgttacccagcaacttatacgggccgccgaaatacgagcgtcagcaaacttggccgccaccaagatgtctgaatgcgtcttgggccaaagcaagcgagtggacttctgcggtaaaggttatcatttgatgtcattccctcaatccgctcctcatggagtggtgtttcttcatgttacttacgtgcctgcacaagagaagaatttcaccactgctccagccatttgtcatgatgggaaagcccatttcccaagggaaggagtattcgtctcaaatggaacacattggttcgtaacacagagaaacttctacgaaccacaaatcataacaacccacaatacgttcgtttcagggaactgcgatgtcgtaatcggaatagtaaacaatacggtctatgacccattgcaaccagagcttgactctttcaaagaagagttggataagtactttaagaatcatacgtctccggacgtagatcttggcgatataagtggcattaatgcttctgttgtgaatatacagaaagaaatcgacagacttaacgaggtcgcgaagaatctgaacgagtcattgatagaccttcaggaattgggcaagtatgaacagtacattaaatggccgtggtacatatggctagggtttatagcaggccttatagcaatcgtcatggttaccatcatgctttgctgtatgaccagttgctgctcatgcctgaagggttgttgttcctgcggatcttgctgtaagttcgatgaagacgattctgagcctgtcctcaaaggagtaaagctccattacacctaa

SEQ ID NO: 40 - DNA, 2094 bp, Artificial Sequence
  open reading frame
atgtttgtcttcttggtccttctgccgcttgtttcttcacaatgtgtgcgcgtgcagcccacggaatcaattgtgcggtttcccaatattacaaacttgtgccctttcggcgaggtcttcaatgcaacgcgctttgcgtcagtttacgcctggaataggaagaggatatcaaactgcgtggctgactattctgtgctttacaactctgctagtttcagtacctttaagtgttacggtgtgagtccgacgaagctcaatgatctttgtttcactaatgtatacgcggacagtttcgttatacgaggagacgaggtccggcaaatcgcacccggccaaacgggaaagattgctgactacaactacaaattgcccgatgactttacgggatgcgtcattgcatggaattctaataatctggatagcaaagtaggtggaaactataattatctctaccggctcttccgaaagagtaatctcaaaccgtttgaaagagatattagcacggaaatatatcaagccggctccacaccatgtaatggagttgaaggctttaattgttatttcccgttgcaaagttacggatttcagcccacgaacggtgtgggttatcaaccgtatcgggtcgtagttctcagcttcgagctgcttcatgcgcccgcgactgtttgcggtcctaagaagtcaaccaatctcgtaaagaacaagtgtgtgaacttcggatctggatcaggttcacgcgttcagcctacagagtcaattgtgcgatttcctaacatcactaacctgtgcccgtttggagaagtatttaatgcgactcgcttcgctagtgtctatgcgtggaatcgaaagcggatctcaaactgtgtggcagattattccgtcctgtataatagtgccagcttctcaacgtttaaatgctacggagttagcccaacgaagctgaacgacttgtgctttacgaacgtgtatgccgattccttcgtcatccgcggagacgaagttcgccaaatcgcaccaggtcaaacgggtaatatagcggactacaactacaagctgcccgacgatttcactgggtgcgtgatcgcgtggaatagtaacaacttggactccaaagtgggtggcaactacaactatctgtataggctgtttcgaaagtccaacttgaaaccgtttgaaagggatattagtacagagatctatcaagctggtagcacaccctgcaacggtgttaaaggctttaactgctactttcctttgcagagctatggatttcagcctacttatggagtcggttaccaaccttatcgcgtcgtagtactgagtttcgaactccttcatgcacccgcaactgtgtgcgggccaaagaagtctaccaatttggtcaagaataagtgtgtaaacttcggtagtggttctggtagtcgagtgcagcccacagaatccatagttcgattccctaacatcactaatttgtgtccatttggtgaagtgtttaacgcgaccaggttcgccagcgtttatgcatggaatagaaagcggatcagtaattgcgtggccgattattctgtcctgtataattcagcatccttctctactttcaagtgttatggtgtttcaccaaccaaattgaacgatctctgcttcactaatgtttatgcagacagctttgtgatacgaggagatgaggtcagacagattgctcccgggcaaacgggaaagattgctgattataactacaagctgcctgacgactttacgggctgtgtcatagcgtggaacagcaataacctcgatagtaaggtaggcggtaattacaactaccggtatagactgtttcggaagtccaatctgaagcctttcgaacgcgatattagtaccgagatctatcaggcaggttccacaccttgcaatggagtggagggctttaattgctatttccctctgcaatcctacggattccaaccaacctatggcgttggctaccagccttatcgggtggtcgtgctttcctttgaacttcttcacgcacccgctactgtatgtggccctaagaagagcactaaccttgtgaagaacaaatgcgtcaatttctaa

SEQ ID NO: 41 - protein, 16 aa, Artificial Sequence
  signal peptide of S antigen
MFVFLVLLPLVSSQCV

SEQ ID NO: 42 - protein, 6 aa, Artificial Sequence
  GS linker
GSGSGS

SEQ ID NO: 43 - protein, 697 aa, Artificial Sequence
  encoded protein
  MISC_FEATURE (1)..(16): signal peptide of S antigen
  MISC_FEATURE (240)..(245): GS linker
  MISC_FEATURE (469)..(474): GS linker
MFVFLVLLPLVSSQCVRVQPTESIVRFPNITNLCPFGEVFNATRFASVYAWNRKRISNCVADYSVLYNSASFSTFKCYGVSPTKLNDLCFTNVYADSFVIRGDEVRQIAPGQTGKIADYNYKLPDDFTGCVIAWNSNNLDSKVGGNYNYLYRLFRKSNLKPFERDISTEIYQAGSTPCNGVEGFNCYFPLQSYGFQPTNGVGYQPYRVVVLSFELLHAPATVCGPKKSTNLVKNKCVNFGSGSGSRVQPTESIVRFPNITNLCPFGEVFNATRFASVYAWNRKRISNCVADYSVLYNSASFSTFKCYGVSPTKLNDLCFTNVYADSFVIRGDEVRQIAPGQTGNIADYNYKLPDDFTGCVIAWNSNNLDSKVGGNYNYLYRLFRKSNLKPFERDISTEIYQAGSTPCNGVKGFNCYFPLQSYGFQPTYGVGYQPYRVVVLSFELLHAPATVCGPKKSTNLVKNKCVNFGSGSGSRVQPTESIVRFPNITNLCPFGEVFNATRFASVYAWNRKRISNCVADYSVLYNSASFSTFKCYGVSPTKLNDLCFTNVYADSFVIRGDEVRQIAPGQTGKIADYNYKLPDDFTGCVIAWNSNNLDSKVGGNYNYRYRLFRKSNLKPFERDISTEIYQAGSTPCNGVEGFNCYFPLQSYGFQPTYGVGYQPYRVVVLSFELLHAPATVCGPKKSTNLVKNKCVNF

SEQ ID NO: 44 - DNA, 2193 bp, Artificial Sequence
  open reading frame
atgtttgtcttcttggtccttctgccgcttgtttcttcacaatgtgtgcgcgtgcagcccacggaatcaattgtgcggtttcccaatattacaaacttgtgccctttcggcgaggtcttcaatgcaacgcgctttgcgtcagtttacgcctggaataggaagaggatatcaaactgcgtggctgactattctgtgctttacaactctgctagtttcagtacctttaagtgttacggtgtgagtccgacgaagctcaatgatctttgtttcactaatgtatacgcggacagtttcgttatacgaggagacgaggtccggcaaatcgcacccggccaaacgggaaagattgctgactacaactacaaattgcccgatgactttacgggatgcgtcattgcatggaattctaataatctggatagcaaagtaggtggaaactataattatctctaccggctcttccgaaagagtaatctcaaaccgtttgaaagagatattagcacggaaatatatcaagccggctccacaccatgtaatggagttgaaggctttaattgttatttcccgttgcaaagttacggatttcagcccacgaacggtgtgggttatcaaccgtatcgggtcgtagttctcagcttcgagctgcttcatgcgcccgcgactgtttgcggtcctaagaagtcaaccaatctcgtaaagaacaagtgtgtgaacttcggatctggatcaggttcacgcgttcagcctacagagtcaattgtgcgatttcctaacatcactaacctgtgcccgtttggagaagtatttaatgcgactcgcttcgctagtgtctatgcgtggaatcgaaagcggatctcaaactgtgtggcagattattccgtcctgtataatagtgccagcttctcaacgtttaaatgctacggagttagcccaacgaagctgaacgacttgtgctttacgaacgtgtatgccgattccttcgtcatccgcggagacgaagttcgccaaatcgcaccaggtcaaacgggtaatatagcggactacaactacaagctgcccgacgatttcactgggtgcgtgatcgcgtggaatagtaacaacttggactccaaagtgggtggcaactacaactatctgtataggctgtttcgaaagtccaacttgaaaccgtttgaaagggatattagtacagagatctatcaagctggtagcacaccctgcaacggtgttaaaggctttaactgctactttcctttgcagagctatggatttcagcctacttatggagtcggttaccaaccttatcgcgtcgtagtactgagtttcgaactccttcatgcacccgcaactgtgtgcgggccaaagaagtctaccaatttggtcaagaataagtgtgtaaacttcggtagtggttctggtagtcgagtgcagcccacagaatccatagttcgattccctaacatcactaatttgtgtccatttggtgaagtgtttaacgcgaccaggttcgccagcgtttatgcatggaatagaaagcggatcagtaattgcgtggccgattattctgtcctgtataattcagcatccttctctactttcaagtgttatggtgtttcaccaaccaaattgaacgatctctgcttcactaatgtttatgcagacagctttgtgatacgaggagatgaggtcagacagattgctcccgggcaaacgggaaagattgctgattataactacaagctgcctgacgactttacgggctgtgtcatagcgtggaacagcaataacctcgatagtaaggtaggcggtaattacaactaccggtatagactgtttcggaagtccaatctgaagcctttcgaacgcgatattagtaccgagatctatcaggcaggttccacaccttgcaatggagtggagggctttaattgctatttccctctgcaatcctacggattccaaccaacctatggcgttggctaccagccttatcgggtggtcgtgctttcctttgaacttcttcacgcacccgctactgtatgtggccctaagaagagcactaaccttgtgaagaacaaatgcgtcaatttcggatcaggaagtggatcaggttatatccctgaagcgccaagagacggacaggcttatgtcagaaaggatggtgaatgggtcttgctttcgacgttcctataa

SEQ ID NO: 45 - protein, 27 aa, Artificial Sequence
  T4 Foldon domain
GYIPEAPRDGQAYVRKDGEWVLLSTFL

SEQ ID NO: 46 - protein, 730 aa, Artificial Sequence
  encoded protein
  MISC_FEATURE (1)..(16): signal peptide of S antigen
  MISC_FEATURE (240)..(245): GS linker
  MISC_FEATURE (469)..(474): GS linker
  MISC_FEATURE (698)..(703): GS linker
  MISC_FEATURE (704)..(730): T4 Foldon domain
MFVFLVLLPLVSSQCVRVQPTESIVRFPNITNLCPFGEVFNATRFASVYAWNRKRISNCVADYSVLYNSASFSTFKCYGVSPTKLNDLCFTNVYADSFVIRGDEVRQIAPGQTGKIADYNYKLPDDFTGCVIAWNSNNLDSKVGGNYNYLYRLFRKSNLKPFERDISTEIYQAGSTPCNGVEGFNCYFPLQSYGFQPTNGVGYQPYRVVVLSFELLHAPATVCGPKKSTNLVKNKCVNFGSGSGSRVQPTESIVRFPNITNLCPFGEVFNATRFASVYAWNRKRISNCVADYSVLYNSASFSTFKCYGVSPTKLNDLCFTNVYADSFVIRGDEVRQIAPGQTGNIADYNYKLPDDFTGCVIAWNSNNLDSKVGGNYNYLYRLFRKSNLKPFERDISTEIYQAGSTPCNGVKGFNCYFPLQSYGFQPTYGVGYQPYRVVVLSFELLHAPATVCGPKKSTNLVKNKCVNFGSGSGSRVQPTESIVRFPNITNLCPFGEVFNATRFASVYAWNRKRISNCVADYSVLYNSASFSTFKCYGVSPTKLNDLCFTNVYADSFVIRGDEVRQIAPGQTGKIADYNYKLPDDFTGCVIAWNSNNLDSKVGGNYNYRYRLFRKSNLKPFERDISTEIYQAGSTPCNGVEGFNCYFPLQSYGFQPTYGVGYQPYRVVVLSFELLHAPATVCGPKKSTNLVKNKCVNFGSGSGSGYIPEAPRDGQAYVRKDGEWVLLSTFL

SEQ ID NO: 47 - DNA, 2307 bp, Artificial Sequence
  ORF of the RBD domain of the Wuhan-Hu-1 reference strain, the RBD domain of the B.1.351 variant, and an RBD domain combining N501Y and L452R mutations of the B.1.1.7 and B.1.429+B.1.427 variants
atgtttgtcttcttggtccttctgccgcttgtttcttcacaatgtgtgcgcgtgcagcccacggaatcaattgtgcggtttcccaatattacaaacttgtgccctttcggcgaggtcttcaatgcaacgcgctttgcgtcagtttacgcctggaataggaagaggatatcaaactgcgtggctgactattctgtgctttacaactctgctagtttcagtacctttaagtgttacggtgtgagtccgacgaagctcaatgatctttgtttcactaatgtatacgcggacagtttcgttatacgaggagacgaggtccggcaaatcgcacccggccaaacgggaaagattgctgactacaactacaaattgcccgatgactttacgggatgcgtcattgcatggaattctaataatctggatagcaaagtaggtggaaactataattatctctaccggctcttccgaaagagtaatctcaaaccgtttgaaagagatattagcacggaaatatatcaagccggctccacaccatgtaatggagttgaaggctttaattgttatttcccgttgcaaagttacggatttcagcccacgaacggtgtgggttatcaaccgtatcgggtcgtagttctcagcttcgagctgcttcatgcgcccgcgactgtttgcggtcctaagaagtcaaccaatctcgtaaagaacaagtgtgtgaacttcggatctggatcaggttcaggagctaccaatttcagtctactaaagcaagcgggtgatgttgaggagaatcccggacctatgttcgtgtttcttgtgttgttgccactggtttcatcccaatgtgtgcgcgttcagcctacagagtcaattgtgcgatttcctaacatcactaacctgtgcccgtttggagaagtatttaatgcgactcgcttcgctagtgtctatgcgtggaatcgaaagcggatctcaaactgtgtggcagattattccgtcctgtataatagtgccagcttctcaacgtttaaatgctacggagttagcccaacgaagctgaacgacttgtgctttacgaacgtgtatgccgattccttcgtcatccgcggagacgaagttcgccaaatcgcaccaggtcaaacgggtaatatagcggactacaactacaagctgcccgacgatttcactgggtgcgtgatcgcgtggaatagtaacaacttggactccaaagtgggtggcaactacaactatctgtataggctgtttcgaaagtccaacttgaaaccgtttgaaagggatattagtacagagatctatcaagctggtagcacaccctgcaacggtgttaaaggctttaactgctactttcctttgcagagctatggatttcagcctacttatggagtcggttaccaaccttatcgcgtcgtagtactgagtttcgaactccttcatgcacccgcaactgtgtgcgggccaaagaagtctaccaatttggtcaagaataagtgtgtaaacttcggtagtggttctggtagtggagaaggtcgtggttctctacttacgtgcggagatgttgaggagaatccaggacctatgtttgtctttctcgtacttctgcctctggtcagcagccaatgtgtgcgagtgcagcccacagaatccatagttcgattccctaacatcactaatttgtgtccatttggtgaagtgtttaacgcgaccaggttcgccagcgtttatgcatggaatagaaagcggatcagtaattgcgtggccgattattctgtcctgtataattcagcatccttctctactttcaagtgttatggtgtttcaccaaccaaattgaacgatctctgcttcactaatgtttatgcagacagctttgtgatacgaggagatgaggtcagacagattgctcccgggcaaacgggaaagattgctgattataactacaagctgcctgacgactttacgggctgtgtcatagcgtggaacagcaataacctcgatagtaaggtaggcggtaattacaactaccggtatagactgtttcggaagtccaatctgaagcctttcgaacgcgatattagtaccgagatctatcaggcaggttccacaccttgcaatggagtggagggctttaattgctatttccctctgcaatcctacggattccaaccaacctatggcgttggctaccagccttatcgggtggtcgtgctttcctttgaacttcttcacgcacccgctactgtatgtggccctaagaagagcactaaccttgtgaagaacaaatgcgtcaatttctaa

SEQ ID NO: 48 - protein, 768 aa, Artificial Sequence
  encoded protein sequence of the RBD domain of the Wuhan-Hu-1 reference strain, the RBD domain of the B.1.351 variant, and an RBD domain combining N501Y and L452R mutations of the B.1.1.7 and B.1.429+B.1.427 variants
  MISC_FEATURE (1)..(16): signal peptide of S antigen
  MISC_FEATURE (240)..(245): GS linker
  MISC_FEATURE (266)..(281): signal peptide to S antigen
  MISC_FEATURE (505)..(510): GS linker
  MISC_FEATURE (529)..(545): signal peptide of S antigen
MFVFLVLLPLVSSQCVRVQPTESIVRFPNITNLCPFGEVFNATRFASVYAWNRKRISNCVADYSVLYNSASFSTFKCYGVSPTKLNDLCFTNVYADSFVIRGDEVRQIAPGQTGKIADYNYKLPDDFTGCVIAWNSNNLDSKVGGNYNYLYRLFRKSNLKPFERDISTEIYQAGSTPCNGVEGFNCYFPLQSYGFQPTNGVGYQPYRVVVLSFELLHAPATVCGPKKSTNLVKNKCVNFGSGSGSGATNFSLLKQAGDVEENPGPMFVFLVLLPLVSSQCVRVQPTESIVRFPNITNLCPFGEVFNATRFASVYAWNRKRISNCVADYSVLYNSASFSTFKCYGVSPTKLNDLCFTNVYADSFVIRGDEVRQIAPGQTGNIADYNYKLPDDFTGCVIAWNSNNLDSKVGGNYNYLYRLFRKSNLKPFERDISTEIYQAGSTPCNGVKGFNCYFPLQSYGFQPTYGVGYQPYRVVVLSFELLHAPATVCGPKKSTNLVKNKCVNFGSGSGSGEGRGSLLTCGDVEENPGPMFVFLVLLPLVSSQCVRVQPTESIVRFPNITNLCPFGEVFNATRFASVYAWNRKRISNCVADYSVLYNSASFSTFKCYGVSPTKLNDLCFTNVYADSFVIRGDEVRQIAPGQTGKIADYNYKLPDDFTGCVIAWNSNNLDSKVGGNYNYRYRLFRKSNLKPFERDISTEIYQAGSTPCNGVEGFNCYFPLQSYGFQPTYGVGYQPYRVVVLSFELLHAPATVCGPKKSTNLVKNKCVNF

SEQ ID NO: 49 - DNA, 2604 bp, Artificial Sequence
  ORF of the RBD domain of the Wuhan-Hu-1 reference strain, the RBD domain of the B.1.351 variant, and a RBD domain combining N501Y and L452R mutations of the B.1.1.7 and B.1.429+B.1.427 variants
atgtttgtcttcttggtccttctgccgcttgtttcttcacaatgtgtgcgcgtgcagcccacggaatcaattgtgcggtttcccaatattacaaacttgtgccctttcggcgaggtcttcaatgcaacgcgctttgcgtcagtttacgcctggaataggaagaggatatcaaactgcgtggctgactattctgtgctttacaactctgctagtttcagtacctttaagtgttacggtgtgagtccgacgaagctcaatgatctttgtttcactaatgtatacgcggacagtttcgttatacgaggagacgaggtccggcaaatcgcacccggccaaacgggaaagattgctgactacaactacaaattgcccgatgactttacgggatgcgtcattgcatggaattctaataatctggatagcaaagtaggtggaaactataattatctctaccggctcttccgaaagagtaatctcaaaccgtttgaaagagatattagcacggaaatatatcaagccggctccacaccatgtaatggagttgaaggctttaattgttatttcccgttgcaaagttacggatttcagcccacgaacggtgtgggttatcaaccgtatcgggtcgtagttctcagcttcgagctgcttcatgcgcccgcgactgtttgcggtcctaagaagtcaaccaatctcgtaaagaacaagtgtgtgaacttcggatctggatcaggttcaggttacattccagaagcaccacgagacggtcaggcatacgtgcgtaaggacggtgagtgggtgctactaagtacattcttaggttcgggttcgggttctggagctaccaatttcagtctactaaagcaagcgggtgatgttgaggagaatcccggacctatgttcgtgtttcttgtgttgttgccactggtttcatcccaatgtgtgcgcgttcagcctacagagtcaattgtgcgatttcctaacatcactaacctgtgcccgtttggagaagtatttaatgcgactcgcttcgctagtgtctatgcgtggaatcgaaagcggatctcaaactgtgtggcagattattccgtcctgtataatagtgccagcttctcaacgtttaaatgctacggagttagcccaacgaagctgaacgacttgtgctttacgaacgtgtatgccgattccttcgtcatccgcggagacgaagttcgccaaatcgcaccaggtcaaacgggtaatatagcggactacaactacaagctgcccgacgatttcactgggtgcgtgatcgcgtggaatagtaacaacttggactccaaagtgggtggcaactacaactatctgtataggctgtttcgaaagtccaacttgaaaccgtttgaaagggatattagtacagagatctatcaagctggtagcacaccctgcaacggtgttaaaggctttaactgctactttcctttgcagagctatggatttcagcctacttatggagtcggttaccaaccttatcgcgtcgtagtactgagtttcgaactccttcatgcacccgcaactgtgtgcgggccaaagaagtctaccaatttggtcaagaataagtgtgtaaacttcggtagtggttctggtagtggatatataccggaggctcctcgtgatggacaagcctatgtacgtaaagatggagaatgggtattattgagtacgttcttaggatctggatccggatcaggagaaggtcgtggttctctacttacgtgcggagatgttgaggagaatccaggacctatgtttgtctttctcgtacttctgcctctggtcagcagccaatgtgtgcgagtgcagcccacagaatccatagttcgattccctaacatcactaatttgtgtccatttggtgaagtgtttaacgcgaccaggttcgccagcgtttatgcatggaatagaaagcggatcagtaattgcgtggccgattattctgtcctgtataattcagcatccttctctactttcaagtgttatggtgtttcaccaaccaaattgaacgatctctgcttcactaatgtttatgcagacagctttgtgatacgaggagatgaggtcagacagattgctcccgggcaaacgggaaagattgctgattataactacaagctgcctgacgactttacgggctgtgtcatagcgtggaacagcaataacctcgatagtaaggtaggcggtaattacaactaccggtatagactgtttcggaagtccaatctgaagcctttcgaacgcgatattagtaccgagatctatcaggcaggttccacaccttgcaatggagtggagggctttaattgctatttccctctgcaatcctacggattccaaccaacctatggcgttggctaccagccttatcgggtggtcgtgctttcctttgaacttcttcacgcacccgctactgtatgtggccctaagaagagcactaaccttgtgaagaacaaatgcgtcaatttcggatcaggaagtggatcaggttatatccctgaagcgccaagagacggacaggcttatgtcagaaaggatggtgaatgggtcttgctttcgacgttcctataa

SEQ ID NO: 50 - protein, 867 aa, Artificial Sequence
  encoded protein sequence of the RBD domain of the Wuhan-Hu-1 reference strain, the RBD domain of the B.1.351 variant, and a RBD domain combining N501Y and L452R mutations of the B.1.1.7 and B.1.429+B.1.427 variants
  MISC_FEATURE (1)..(16): signal peptide of S antigen
  MISC_FEATURE (240)..(245): GS linker
  MISC_FEATURE (246)..(272): T4 Foldon domain
  MISC_FEATURE (273)..(278): GS linker
  MISC_FEATURE (299)..(314): signal peptide of S antigen
  MISC_FEATURE (538)..(543): GS linker
  MISC_FEATURE (544)..(570): T4 Foldon domain
  MISC_FEATURE (571)..(576): GS linker
  MISC_FEATURE (596)..(611): signal peptide of S antigen
  MISC_FEATURE (835)..(840): GS linker
  MISC_FEATURE (841)..(867): T4 Foldon domain
MFVFLVLLPLVSSQCVRVQPTESIVRFPNITNLCPFGEVFNATRFASVYAWNRKRISNCVADYSVLYNSASFSTFKCYGVSPTKLNDLCFTNVYADSFVIRGDEVRQIAPGQTGKIADYNYKLPDDFTGCVIAWNSNNLDSKVGGNYNYLYRLFRKSNLKPFERDISTEIYQAGSTPCNGVEGFNCYFPLQSYGFQPTNGVGYQPYRVVVLSFELLHAPATVCGPKKSTNLVKNKCVNFGSGSGSGYIPEAPRDGQAYVRKDGEWVLLSTFLGSGSGSGATNFSLLKQAGDVEENPGPMFVFLVLLPLVSSQCVRVQPTESIVRFPNITNLCPFGEVFNATRFASVYAWNRKRISNCVADYSVLYNSASFSTFKCYGVSPTKLNDLCFTNVYADSFVIRGDEVRQIAPGQTGNIADYNYKLPDDFTGCVIAWNSNNLDSKVGGNYNYLYRLFRKSNLKPFERDISTEIYQAGSTPCNGVKGFNCYFPLQSYGFQPTYGVGYQPYRVVVLSFELLHAPATVCGPKKSTNLVKNKCVNFGSGSGSGYIPEAPRDGQAYVRKDGEWVLLSTFLGSGSGSGEGRGSLLTCGDVEENPGPMFVFLVLLPLVSSQCVRVQPTESIVRFPNITNLCPFGEVFNATRFASVYAWNRKRISNCVADYSVLYNSASFSTFKCYGVSPTKLNDLCFTNVYADSFVIRGDEVRQIAPGQTGKIADYNYKLPDDFTGCVIAWNSNNLDSKVGGNYNYRYRLFRKSNLKPFERDISTEIYQAGSTPCNGVEGFNCYFPLQSYGFQPTYGVGYQPYRVVVLSFELLHAPATVCGPKKSTNLVKNKCVNFGSGSGSGYIPEAPRDGQAYVRKDGEWVLLSTFL

SEQ ID NO: 51 - DNA, 2235 bp, Artificial Sequence
  ORF of the RBD domain of the Wuhan-Hu-1 reference strain, the RBD domain of the B.1.351 variant, and an RBD domain combining N501Y and L452R mutations of the B.1.1.7 and B.1.429+B.1.427 variants
atgtttgtcttcttggtccttctgccgcttgtttcttcacaatgtgtgcgcgtgcagcccacggaatcaattgtgcggtttcccaatattacaaacttgtgccctttcggcgaggtcttcaatgcaacgcgctttgcgtcagtttacgcctggaataggaagaggatatcaaactgcgtggctgactattctgtgctttacaactctgctagtttcagtacctttaagtgttacggtgtgagtccgacgaagctcaatgatctttgtttcactaatgtatacgcggacagtttcgttatacgaggagacgaggtccggcaaatcgcacccggccaaacgggaaagattgctgactacaactacaaattgcccgatgactttacgggatgcgtcattgcatggaattctaataatctggatagcaaagtaggtggaaactataattatctctaccggctcttccgaaagagtaatctcaaaccgtttgaaagagatattagcacggaaatatatcaagccggctccacaccatgtaatggagttgaaggctttaattgttatttcccgttgcaaagttacggatttcagcccacgaacggtgtgggttatcaaccgtatcgggtcgtagttctcagcttcgagctgcttcatgcgcccgcgactgtttgcggtcctaagaagtcaaccaatctcgtaaagaacaagtgtgtgaacttcggatctggatcaggttcacgcgttcagcctacagagtcaattgtgcgatttcctaacatcactaacctgtgcccgtttggagaagtatttaatgcgactcgcttcgctagtgtctatgcgtggaatcgaaagcggatctcaaactgtgtggcagattattccgtcctgtataatagtgccagcttctcaacgtttaaatgctacggagttagcccaacgaagctgaacgacttgtgctttacgaacgtgtatgccgattccttcgtcatccgcggagacgaagttcgccaaatcgcaccaggtcaaacgggtaatatagcggactacaactacaagctgcccgacgatttcactgggtgcgtgatcgcgtggaatagtaacaacttggactccaaagtgggtggcaactacaactatctgtataggctgtttcgaaagtccaacttgaaaccgtttgaaagggatattagtacagagatctatcaagctggtagcacaccctgcaacggtgttaaaggctttaactgctactttcctttgcagagctatggatttcagcctacttatggagtcggttaccaaccttatcgcgtcgtagtactgagtttcgaactccttcatgcacccgcaactgtgtgcgggccaaagaagtctaccaatttggtcaagaataagtgtgtaaacttcggtagtggttctggtagtcgagtgcagcccacagaatccatagttcgattccctaacatcactaatttgtgtccatttggtgaagtgtttaacgcgaccaggttcgccagcgtttatgcatggaatagaaagcggatcagtaattgcgtggccgattattctgtcctgtataattcagcatccttctctactttcaagtgttatggtgtttcaccaaccaaattgaacgatctctgcttcactaatgtttatgcagacagctttgtgatacgaggagatgaggtcagacagattgctcccgggcaaacgggaaagattgctgattataactacaagctgcctgacgactttacgggctgtgtcatagcgtggaacagcaataacctcgatagtaaggtaggcggtaattacaactaccggtatagactgtttcggaagtccaatctgaagcctttcgaacgcgatattagtaccgagatctatcaggcaggttccacaccttgcaatggagtggagggctttaattgctatttccctctgcaatcctacggattccaaccaacctatggcgttggctaccagccttatcgggtggtcgtgctttcctttgaacttcttcacgcacccgctactgtatgtggccctaagaagagcactaaccttgtgaagaacaaatgcgtcaatttcggatcaggaagtggatcatggtacatatggctagggtttatagcaggccttatagcaatcgtcatggttaccatcatgctttgctgtatgaccagttgctgctcatgcctgaagggttgttgttcctgcggatcttgctgttaa

SEQ ID NO: 52 - protein, 744 aa, Artificial Sequence
  encoded protein sequence of the RBD domain of the Wuhan-Hu-1 reference strain, the RBD domain of the B.1.351 variant, and an RBD domain combining N501Y and L452R mutations of the B.1.1.7 and B.1.429+B.1.427 variants
  MISC_FEATURE (1)..(16): signal peptide of S antigen
  MISC_FEATURE (240)..(245): GS linker
  MISC_FEATURE (469)..(474): GS linker
  MISC_FEATURE (698)..(703): GS linker
MFVFLVLLPLVSSQCVRVQPTESIVRFPNITNLCPFGEVFNATRFASVYAWNRKRISNCVADYSVLYNSASFSTFKCYGVSPTKLNDLCFTNVYADSFVIRGDEVRQIAPGQTGKIADYNYKLPDDFTGCVIAWNSNNLDSKVGGNYNYLYRLFRKSNLKPFERDISTEIYQAGSTPCNGVEGFNCYFPLQSYGFQPTNGVGYQPYRVVVLSFELLHAPATVCGPKKSTNLVKNKCVNFGSGSGSRVQPTESIVRFPNITNLCPFGEVFNATRFASVYAWNRKRISNCVADYSVLYNSASFSTFKCYGVSPTKLNDLCFTNVYADSFVIRGDEVRQIAPGQTGNIADYNYKLPDDFTGCVIAWNSNNLDSKVGGNYNYLYRLFRKSNLKPFERDISTEIYQAGSTPCNGVKGFNCYFPLQSYGFQPTYGVGYQPYRVVVLSFELLHAPATVCGPKKSTNLVKNKCVNFGSGSGSRVQPTESIVRFPNITNLCPFGEVFNATRFASVYAWNRKRISNCVADYSVLYNSASFSTFKCYGVSPTKLNDLCFTNVYADSFVIRGDEVRQIAPGQTGKIADYNYKLPDDFTGCVIAWNSNNLDSKVGGNYNYRYRLFRKSNLKPFERDISTEIYQAGSTPCNGVEGFNCYFPLQSYGFQPTYGVGYQPYRVVVLSFELLHAPATVCGPKKSTNLVKNKCVNFGSGSGSWYIWLGFIAGLIAIVMVTIMLCCMTSCCSCLKGCCSCGSCC

SEQ ID NO: 53 - DNA, 2730 bp, Artificial Sequence
  ORF of the RBD domain of the Wuhan-Hu-1 reference strain, the RBD domain of the B.1.351 variant, and an RBD domain combining N501Y and L452R mutations of the B.1.1.7 and B.1.429+B.1.427 variants
atgtttgtcttcttggtccttctgccgcttgtttcttcacaatgtgtgcgcgtgcagcccacggaatcaattgtgcggtttcccaatattacaaacttgtgccctttcggcgaggtcttcaatgcaacgcgctttgcgtcagtttacgcctggaataggaagaggatatcaaactgcgtggctgactattctgtgctttacaactctgctagtttcagtacctttaagtgttacggtgtgagtccgacgaagctcaatgatctttgtttcactaatgtatacgcggacagtttcgttatacgaggagacgaggtccggcaaatcgcacccggccaaacgggaaagattgctgactacaactacaaattgcccgatgactttacgggatgcgtcattgcatggaattctaataatctggatagcaaagtaggtggaaactataattatctctaccggctcttccgaaagagtaatctcaaaccgtttgaaagagatattagcacggaaatatatcaagccggctccacaccatgtaatggagttgaaggctttaattgttatttcccgttgcaaagttacggatttcagcccacgaacggtgtgggttatcaaccgtatcgggtcgtagttctcagcttcgagctgcttcatgcgcccgcgactgtttgcggtcctaagaagtcaaccaatctcgtaaagaacaagtgtgtgaacttcggatctggatcaggttcatggtacatctggctcggctttatagctggcctgatcgccattgtgatggtgactattatgttgtgttgcatgactagctgctgttcatgtcttaagggatgctgcagctgcggtagctgctgtggttcgggttcgggttctggagctaccaatttcagtctactaaagcaagcgggtgatgttgaggagaatcccggacctatgttcgtgtttcttgtgttgttgccactggtttcatcccaatgtgtgcgcgttcagcctacagagtcaattgtgcgatttcctaacatcactaacctgtgcccgtttggagaagtatttaatgcgactcgcttcgctagtgtctatgcgtggaatcgaaagcggatctcaaactgtgtggcagattattccgtcctgtataatagtgccagcttctcaacgtttaaatgctacggagttagcccaacgaagctgaacgacttgtgctttacgaacgtgtatgccgattccttcgtcatccgcggagacgaagttcgccaaatcgcaccaggtcaaacgggtaatatagcggactacaactacaagctgcccgacgatttcactgggtgcgtgatcgcgtggaatagtaacaacttggactccaaagtgggtggcaactacaactatctgtataggctgtttcgaaagtccaacttgaaaccgtttgaaagggatattagtacagagatctatcaagctggtagcacaccctgcaacggtgttaaaggctttaactgctactttcctttgcagagctatggatttcagcctacttatggagtcggttaccaaccttatcgcgtcgtagtactgagtttcgaactccttcatgcacccgcaactgtgtgcgggccaaagaagtctaccaatttggtcaagaataagtgtgtaaacttcggtagtggttctggtagttggtatatatggctagggttcattgctggacttatagcaattgtgatggtaacgatcatgttgtgttgcatgacttcctgctgcagttgcctcaaaggatgttgttcctgtggatcatgctgtggatctggatccggatcaggagaaggtcgtggttctctacttacgtgcggagatgttgaggagaatccaggacctatgtttgtctttctcgtacttctgcctctggtcagcagccaatgtgtgcgagtgcagcccacagaatccatagttcgattccctaacatcactaatttgtgtccatttggtgaagtgtttaacgcgaccaggttcgccagcgtttatgcatggaatagaaagcggatcagtaattgcgtggccgattattctgtcctgtataattcagcatccttctctactttcaagtgttatggtgtttcaccaaccaaattgaacgatctctgcttcactaatgtttatgcagacagctttgtgatacgaggagatgaggtcagacagattgctcccgggcaaacgggaaagattgctgattataactacaagctgcctgacgactttacgggctgtgtcatagcgtggaacagcaataacctcgatagtaaggtaggcggtaattacaactaccggtatagactgtttcggaagtccaatctgaagcctttcgaacgcgatattagtaccgagatctatcaggcaggttccacaccttgcaatggagtggagggctttaattgctatttccctctgcaatcctacggattccaaccaacctatggcgttggctaccagccttatcgggtggtcgtgctttcctttgaacttcttcacgcacccgctactgtatgtggccctaagaagagcactaaccttgtgaagaacaaatgcgtcaatttcggatcaggaagtggatcatggtacatatggctagggtttatagcaggccttatagcaatcgtcatggttaccatcatgctttgctgtatgaccagttgctgctcatgcctgaagggttgttgttcctgcggatcttgctgttaa

SEQ ID NO: 54 - protein, 909 aa, Artificial Sequence
  encoded protein sequence of the RBD domain of the Wuhan-Hu-1 reference strain, the RBD domain of the B.1.351 variant, and an RBD domain combining N501Y and L452R mutations of the B.1.1.7 and B.1.429+B.1.427 variants
  MISC_FEATURE (1)..(16): signal peptide of S antigen
  MISC_FEATURE (240)..(245): GS linker
  MISC_FEATURE (287)..(292): GS linker
  MISC_FEATURE (313)..(328): signal peptide of S antigen
  MISC_FEATURE (552)..(557): GS linker
  MISC_FEATURE (599)..(604): GS linker
  MISC_FEATURE (624)..(639): signal peptide of S antigen
  MISC_FEATURE (863)..(868): GS linker
MFVFLVLLPLVSSQCVRVQPTESIVRFPNITNLCPFGEVFNATRFASVYAWNRKRISNCVADYSVLYNSASFSTFKCYGVSPTKLNDLCFTNVYADSFVIRGDEVRQIAPGQTGKIADYNYKLPDDFTGCVIAWNSNNLDSKVGGNYNYLYRLFRKSNLKPFERDISTEIYQAGSTPCNGVEGFNCYFPLQSYGFQPTNGVGYQPYRVVVLSFELLHAPATVCGPKKSTNLVKNKCVNFGSGSGSWYIWLGFIAGLIAIVMVTIMLCCMTSCCSCLKGCCSCGSCCGSGSGSGATNFSLLKQAGDVEENPGPMFVFLVLLPLVSSQCVRVQPTESIVRFPNITNLCPFGEVFNATRFASVYAWNRKRISNCVADYSVLYNSASFSTFKCYGVSPTKLNDLCFTNVYADSFVIRGDEVRQIAPGQTGNIADYNYKLPDDFTGCVIAWNSNNLDSKVGGNYNYLYRLFRKSNLKPFERDISTEIYQAGSTPCNGVKGFNCYFPLQSYGFQPTYGVGYQPYRVVVLSFELLHAPATVCGPKKSTNLVKNKCVNFGSGSGSWYIWLGFIAGLIAIVMVTIMLCCMTSCCSCLKGCCSCGSCCGSGSGSGEGRGSLLTCGDVEENPGPMFVFLVLLPLVSSQCVRVQPTESIVRFPNITNLCPFGEVFNATRFASVYAWNRKRISNCVADYSVLYNSASFSTFKCYGVSPTKLNDLCFTNVYADSFVIRGDEVRQIAPGQTGKIADYNYKLPDDFTGCVIAWNSNNLDSKVGGNYNYRYRLFRKSNLKPFERDISTEIYQAGSTPCNGVEGFNCYFPLQSYGFQPTYGVGYQPYRVVVLSFELLHAPATVCGPKKSTNLVKNKCVNFGSGSGSWYIWLGFIAGLIAIVMVTIMLCCMTSCCSCLKGCCSCGSCC

SEQ ID NO: 55 - DNA, 1260 bp, Artificial Sequence
  ORF of a codon-optimized N antigen that includes the N-specific mutations in the B.1.1.7 variant
  misc_feature (3)..(3): leucine
  misc_feature (203)..(203): lysine
  misc_feature (204)..(204): arginine
  misc_feature (235)..(235): phenylalanine
atgtctctaaacggaccacagaatcagcgaaacgcaccacgcattacgtttggtggaccctcagattcaactggcagtaaccagaatggagaacgcagtggagcgcgatctaaacaacgtcggcctcaaggtttacccaataatactgcgtcttggttcaccgctctcactcaacatggcaaggaagaccttaaattccctcgaggacaaggcgttccaattaacaccaatagcagtccagatgaccaaattggctactaccgaagagctaccagacgaattcgtggtggtgacggtaagatgaaagatctcagtccaagatggtatttctactacctaggaactgggccagaagctggacttccctatggtgctaacaaagacggcatcatatgggttgcaactgagggagccttgaatacacctaaagatcacattggcacccgcaatcctgctaacaatgctgcaatcgtgctacaacttcctcaaggaacaacattgcctaaaggcttctacgcagaagggagcagaggcggcagtcaagcctcttctcgttcctcatcacgtagtcgcaacagttcaagaaattcaactccaggcagcagtaaacgaacttctcctgctagaatggctggcaatggcggtgatgctgctcttgctttgctgctgcttgacagattgaaccagcttgagagcaagatgttcggtaaaggccaacaacaacaaggccaaactgtcactaagaaatctgctgctgaggcttctaagaagcctcggcagaaacgtactgccactaaagcatacaatgtaacacaagctttcggcagacgtggtccagaacaaacccaaggaaactttggagaccaggaactaatcagacaaggaactgattacaaacattggccgcaaattgcacaatttgctcccagcgcttcagcgttcttcggaatgtcgcgcattggcatggaagtcacaccttcgggaacgtggttgacctacacaggtgccatcaaattggatgacaaagatccaaatttcaaagatcaagtcatattgctgaataagcatattgacgcatacaagacattcccaccaacagagcctaagaaggacaagaagaagaaggctgatgaaactcaagccttaccgcagagacagaagaaacagcaaactgtgactcttcttcctgctgcagatttggatgatttctccaaacaattgcaacaatccatgagcagtgctgactcaactcaggcctaa

SEQ ID NO: 56 - protein, 419 aa, Artificial Sequence
  encoded protein sequence of a codon-optimized N antigen that includes the N-specific mutations in the B.1.1.7 variant
  MISC_FEATURE (3)..(3): leucine
  MISC_FEATURE (203)..(203): lysine
  MISC_FEATURE (204)..(204): arginine
  MISC_FEATURE (235)..(235): phenylalanine
MSLNGPQNQRNAPRITFGGPSDSTGSNQNGERSGARSKQRRPQGLPNNTASWFTALTQHGKEDLKFPRGQGVPINTNSSPDDQIGYYRRATRRIRGGDGKMKDLSPRWYFYYLGTGPEAGLPYGANKDGIIWVATEGALNTPKDHIGTRNPANNAAIVLQLPQGTTLPKGFYAEGSRGGSQASSRSSSRSRNSSRNSTPGSSKRTSPARMAGNGGDAALALLLLDRLNQLESKMFGKGQQQQGQTVTKKSAAEASKKPRQKRTATKAYNVTQAFGRRGPEQTQGNFGDQELIRQGTDYKHWPQIAQFAPSASAFFGMSRIGMEVTPSGTWLTYTGAIKLDDKDPNFKDQVILLNKHIDAYKTFPPTEPKKDKKKKADETQALPQRQKKQQTVTLLPAADLDDFSKQLQQSMSSADSTQA

SEQ ID NO: 57 - DNA, 1260 bp, Artificial Sequence
  ORF of a codon-optimized N antigen that includes the N-specific mutations in the B.1.351 variant
  misc_feature (205)..(205): isoleucine
atgtctgataacggaccacagaatcagcgaaacgcaccacgcattacgtttggtggaccctcagattcaactggcagtaaccagaatggagaacgcagtggagcgcgatctaaacaacgtcggcctcaaggtttacccaataatactgcgtcttggttcaccgctctcactcaacatggcaaggaagaccttaaattccctcgaggacaaggcgttccaattaacaccaatagcagtccagatgaccaaattggctactaccgaagagctaccagacgaattcgtggtggtgacggtaagatgaaagatctcagtccaagatggtatttctactacctaggaactgggccagaagctggacttccctatggtgctaacaaagacggcatcatatgggttgcaactgagggagccttgaatacacctaaagatcacattggcacccgcaatcctgctaacaatgctgcaatcgtgctacaacttcctcaaggaacaacattgcctaaaggcttctacgcagaagggagcagaggcggcagtcaagcctcttctcgttcctcatcacgtagtcgcaacagttcaagaaattcaactccaggcagcagtagaggaatctctcctgctagaatggctggcaatggcggtgatgctgctcttgctttgctgctgcttgacagattgaaccagcttgagagcaagatgtctggtaaaggccaacaacaacaaggccaaactgtcactaagaaatctgctgctgaggcttctaagaagcctcggcagaaacgtactgccactaaagcatacaatgtaacacaagctttcggcagacgtggtccagaacaaacccaaggaaactttggagaccaggaactaatcagacaaggaactgattacaaacattggccgcaaattgcacaatttgctcccagcgcttcagcgttcttcggaatgtcgcgcattggcatggaagtcacaccttcgggaacgtggttgacctacacaggtgccatcaaattggatgacaaagatccaaatttcaaagatcaagtcatattgctgaataagcatattgacgcatacaagacattcccaccaacagagcctaagaaggacaagaagaagaaggctgatgaaactcaagccttaccgcagagacagaagaaacagcaaactgtgactcttcttcctgctgcagatttggatgatttctccaaacaattgcaacaatccatgagcagtgctgactcaactcaggcctaa

SEQ ID NO: 58 - protein, 419 aa, Artificial Sequence
  encoded protein sequence of a codon-optimized N antigen that includes the N-specific mutations in the B.1.351 variant
  MISC_FEATURE (205)..(205): isoleucine
MSDNGPQNQRNAPRITFGGPSDSTGSNQNGERSGARSKQRRPQGLPNNTASWFTALTQHGKEDLKFPRGQGVPINTNSSPDDQIGYYRRATRRIRGGDGKMKDLSPRWYFYYLGTGPEAGLPYGANKDGIIWVATEGALNTPKDHIGTRNPANNAAIVLQLPQGTTLPKGFYAEGSRGGSQASSRSSSRSRNSSRNSTPGSSRGISPARMAGNGGDAALALLLLDRLNQLESKMSGKGQQQQGQTVTKKSAAEASKKPRQKRTATKAYNVTQAFGRRGPEQTQGNFGDQELIRQGTDYKHWPQIAQFAPSASAFFGMSRIGMEVTPSGTWLTYTGAIKLDDKDPNFKDQVILLNKHIDAYKTFPPTEPKKDKKKKADETQALPQRQKKQQTVTLLPAADLDDFSKQLQQSMSSADSTQA

SEQ ID NO: 59 - DNA, 1260 bp, Artificial Sequence
  ORF of a codon-optimized N antigen that includes the N-specific mutations in the P.1 variant
  misc_feature (80)..(80): arginine
atgtctgataacggaccacagaatcagcgaaacgcaccacgcattacgtttggtggaccctcagattcaactggcagtaaccagaatggagaacgcagtggagcgcgatctaaacaacgtcggcctcaaggtttacccaataatactgcgtcttggttcaccgctctcactcaacatggcaaggaagaccttaaattccctcgaggacaaggcgttccaattaacaccaatagcagtcgagatgaccaaattggctactaccgaagagctaccagacgaattcgtggtggtgacggtaagatgaaagatctcagtccaagatggtatttctactacctaggaactgggccagaagctggacttccctatggtgctaacaaagacggcatcatatgggttgcaactgagggagccttgaatacacctaaagatcacattggcacccgcaatcctgctaacaatgctgcaatcgtgctacaacttcctcaaggaacaacattgcctaaaggcttctacgcagaagggagcagaggcggcagtcaagcctcttctcgttcctcatcacgtagtcgcaacagttcaagaaattcaactccaggcagcagtaaacgaacttctcctgctagaatggctggcaatggcggtgatgctgctcttgctttgctgctgcttgacagattgaaccagcttgagagcaagatgtctggtaaaggccaacaacaacaaggccaaactgtcactaagaaatctgctgctgaggcttctaagaagcctcggcagaaacgtactgccactaaagcatacaatgtaacacaagctttcggcagacgtggtccagaacaaacccaaggaaactttggagaccaggaactaatcagacaaggaactgattacaaacattggccgcaaattgcacaatttgctcccagcgcttcagcgttcttcggaatgtcgcgcattggcatggaagtcacaccttcgggaacgtggttgacctacacaggtgccatcaaattggatgacaaagatccaaatttcaaagatcaagtcatattgctgaataagcatattgacgcatacaagacattcccaccaacagagcctaagaaggacaagaagaagaaggctgatgaaactcaagccttaccgcagagacagaagaaacagcaaactgtgactcttcttcctgctgcagatttggatgatttctccaaacaattgcaacaatccatgagcagtgctgactcaactcaggcctaa

SEQ ID NO: 60 - protein, 419 aa, Artificial Sequence
  encoded protein sequence of a codon-optimized N antigen that includes the N-specific mutations in the P.1 variant
  MISC_FEATURE (80)..(80): arginine
MSDNGPQNQRNAPRITFGGPSDSTGSNQNGERSGARSKQRRPQGLPNNTASWFTALTQHGKEDLKFPRGQGVPINTNSSRDDQIGYYRRATRRIRGGDGKMKDLSPRWYFYYLGTGPEAGLPYGANKDGIIWVATEGALNTPKDHIGTRNPANNAAIVLQLPQGTTLPKGFYAEGSRGGSQASSRSSSRSRNSSRNSTPGSSKRTSPARMAGNGGDAALALLLLDRLNQLESKMSGKGQQQQGQTVTKKSAAEASKKPRQKRTATKAYNVTQAFGRRGPEQTQGNFGDQELIRQGTDYKHWPQIAQFAPSASAFFGMSRIGMEVTPSGTWLTYTGAIKLDDKDPNFKDQVILLNKHIDAYKTFPPTEPKKDKKKKADETQALPQRQKKQQTVTLLPAADLDDFSKQLQQSMSSADSTQA

SEQ ID NO: 61 - DNA, 3822 bp, Artificial Sequence
  ORF of the codon-optimized SARS-CoV-2 S antigen based on the Wuhan-Hu-1 reference strain
atgtttgtctttcttgtcttattgccactagtctctagtcagtgtgttaatcttacaaccagaactcaattaccacctgcatacactaattctttcacacgtggtgtttattaccctgacaaagtattcagatcctcagtattacattcaactcaggacttgttcttacctttcttctccaatgttacttggttccatgctatacatgtctctgggaccaatggtactaagaggtttgataaccctgtcctaccatttaatgatggtgtttatttcgcttccactgagaagtctaacataataagaggctggatatttggtactactttagattcgaagacccagtccctacttattgttaataacgctactaatgttgttattaaagtctgtgaatttcaattctgtaatgatccattcttggatgtttattaccacaagaacaacaagagttggatgaagagtgagttcagagtttattctagtgcgaataattgcactttcgaatatgtctctcagcctttccttatggaccttgaaggtaaacagggtaatttcaagaatcttagggaatttgtgtttaagaatattgatggttatttcaagatatattctaagcacacgcctattaatttagtgcgtgatctccctcagggtttctcggctttagaaccattggtagatttgccaataggtattaacatcactaggtttcaaactttacttgctttacatagaagttatttgactcctggtgattcttcttcaggttggacagctggtgctgcagcttattatgtgggttatcttcaacctaggactttcctattgaaatataatgagaatggaaccattacagatgctgtagactgtgcacttgaccctctctcagaaacaaagtgtacgttgaaatccttcactgtagagaaaggaatctatcaaacttctaactttagagtccaaccaacagaatctattgttagatttcctaatattacaaacttgtgccctttcggtgaagtatttaacgccaccagatttgcatctgtttatgcttggaacaggaagagaatcagcaactgtgttgctgattattctgtcctatataattccgcatcattctccacatttaagtgttatggagtgtctcctactaaattaaatgatctctgctttactaatgtctatgcagattcatttgtaattagaggtgatgaagtcagacaaatcgctccagggcaaactggaaagattgctgattataattataaattaccagatgactttacaggctgcgttatagcttggaattctaacaatcttgattctaaggttggtggtaattataattaccggtatagattgtttaggaagtctaatctcaaacctttcgagagagatatttcaactgaaatctatcaggccggtagcacaccttgtaatggtgttcaaggatttaattgttactttcctttacaatcatatggtttccaacccactaatggtgttggttaccaaccatacagagtagtagtactttcatttgaacttctacatgcaccagcaactgtttgtggacctaagaagtctactaatttggttaagaacaaatgtgtcaatttcaacttcaatggtttaacaggcacaggtgttcttactgagtctaacaagaagtttctgcctttccaacaatttggcagagacattgctgacactactgatgctgtccgtgatccacagacacttgagattcttgacattacaccatgttcatttggtggtgtcagtgttataacaccaggaacaaatacttctaaccaggttgctgttctttatcagggtgttaactgcacagaagtccctgttgctattcatgcagatcaacttactcctacttggcgtgtttattctacaggttctaatgtatttcaaacacgtgcaggctgtttaataggagctgaacatgtcaacaactcatatgagtgtgacatacccattggtgcaggtatatgcgctagttatcagactcagactaattctcgtcggcgggcacgtagtgtagctagtcaatccatcattgcctacactatgtcacttggtgcagagaattcagttgcttactctaataactctattgccatacccacaaactttactattagtgttaccacagaaattctaccagtgtctatgaccaagacatcagtagattgtacaatgtacatttgtggtgattcaactgaatgcagcaatctattgttgcaatatggcagtttctgtacacaattaaaccgtgctttaactggaatagctgttgaacaagacaagaacacccaagaagtatttgcacaagtcaaacaaatttacaagacaccaccaattaaagatttcggtggatttaatttctcacaaatattaccagatccatctaaaccaagcaagaggtcatttattgaagatctactattcaacaaagtgacacttgcagatgctggcttcatcaaacaatatggtgattgccttggtgatattgctgctagagacctcatttgtgcacagaagtttaacggccttactgtattgccacctttgctcacagatgaaatgattgctcaatacacttctgcactgttagcgggtacaatcacttctggttggacctttggtgcaggtgctgcattacaaataccatttgctatgcaaatggcttataggtttaatggtattggagttacacagaatgttctctatgagaaccagaaattgattgccaaccaatttaatagtgctattggcaagattcaagactcactttcttccacagcaagtgcacttggtaaacttcaagatgtggtcaaccagaatgcacaagctttaaacacgcttgttaaacaacttagctccaactttggtgcaatttcaagtgtattaaatgatatcctttcacgtcttgacaaagttgaggctgaagtgcaaattgataggttgatcacaggcagacttcaaagtttgcagacatatgtgactcaacaattaattagagctgcagaaatcagagcttctgctaatcttgctgctactaagatgtcagagtgtgtacttggacaatctaagagagttgatttctgtggaaagggctatcatcttatgtccttccctcagtcagcacctcatggtgtagtcttcttgcatgtgacttatgtccctgcacacgagaagaacttcacaactgctcctgccatttgtcatgatggtaaagcacactttcctcgtgaaggtgtctttgtttcaaatggcacagactggtttgtaacacaaaggaatttctatgaaccacaaatcattactacagacaacacatttgtgtctggtaactgtgatgttgtaataggaattgtcaacaacacagtttatgatcctttgcaacctgaattagactcattcaaggaggagttagataaatatttcaagaatcatacatcaccagatgttgatttaggtgacatctctggcattaatgcttcagttgtaaacattcagaaagaaattgaccgcctcaatgaggttgccaagaatttaaatgaatctctcatcgatctccaagaacttggaaagtatgagcagtatatcaaatggccatggtacatttggctaggtttcatagctggcttgattgccatagtaatggtgacaattatgctttgctgtatgaccagttgctgtagttgtctcaagggctgttgttcttgtggatcctgctgcaaatttgatgaagacgactctgagccagtgctcaaaggagtcaaattacattacacataa

SEQ ID NO: 62 - protein, 1273 aa, Artificial Sequence
  encoded protein sequence of the codon-optimized SARS-CoV-2 S antigen sequence based on the Wuhan-Hu-1 reference strain
  MISC_FEATURE (1)..(16): signal peptide of S antigen
  MISC_FEATURE (142)..(142): aspartic acid
  MISC_FEATURE (154)..(154): lysine
  MISC_FEATURE (681)..(681): lysine
  MISC_FEATURE (1071)..(1071): histidine
  MISC_FEATURE (1101)..(1101): histidine aspartic acid
MFVFLVLLPLVSSQCVNLTTRTQLPPAYTNSFTRGVYYPDKVFRSSVLHSTQDLFLPFFSNVTWFHAIHVSGTNGTKRFDNPVLPFNDGVYFASTEKSNIIRGWIFGTTLDSKTQSLLIVNNATNVVIKVCEFQFCNDPFLDVYYHKNNKSWMKSEFRVYSSANNCTFEYVSQPFLMDLEGKQGNFKNLREFVFKNIDGYFKIYSKHTPINLVRDLPQGFSALEPLVDLPIGINITRFQTLLALHRSYLTPGDSSSGWTAGAAAYYVGYLQPRTFLLKYNENGTITDAVDCALDPLSETKCTLKSFTVEKGIYQTSNFRVQPTESIVRFPNITNLCPFGEVFNATRFASVYAWNRKRISNCVADYSVLYNSASFSTFKCYGVSPTKLNDLCFTNVYADSFVIRGDEVRQIAPGQTGKIADYNYKLPDDFTGCVIAWNSNNLDSKVGGNYNYRYRLFRKSNLKPFERDISTEIYQAGSTPCNGVQGFNCYFPLQSYGFQPTNGVGYQPYRVVVLSFELLHAPATVCGPKKSTNLVKNKCVNFNFNGLTGTGVLTESNKKFLPFQQFGRDIADTTDAVRDPQTLEILDITPCSFGGVSVITPGTNTSNQVAVLYQGVNCTEVPVAIHADQLTPTWRVYSTGSNVFQTRAGCLIGAEHVNNSYECDIPIGAGICASYQTQTNSRRRARSVASQSIIAYTMSLGAENSVAYSNNSIAIPTNFTISVTTEILPVSMTKTSVDCTMYICGDSTECSNLLLQYGSFCTQLNRALTGIAVEQDKNTQEVFAQVKQIYKTPPIKDFGGFNFSQILPDPSKPSKRSFIEDLLFNKVTLADAGFIKQYGDCLGDIAARDLICAQKFNGLTVLPPLLTDEMIAQYTSALLAGTITSGWTFGAGAALQIPFAMQMAYRFNGIGVTQNVLYENQKLIANQFNSAIGKIQDSLSSTASALGKLQDVVNQNAQALNTLVKQLSSNFGAISSVLNDILSRLDKVEAEVQIDRLITGRLQSLQTYVTQQLIRAAEIRASANLAATKMSECVLGQSKRVDFCGKGYHLMSFPQSAPHGVVFLHVTYVPAHEKNFTTAPAICHDGKAHFPREGVFVSNGTDWFVTQRNFYEPQIITTDNTFVSGNCDVVIGIVNNTVYDPLQPELDSFKEELDKYFKNHTSPDVDLGDISGINASVVNIQKEIDRLNEVAKNLNESLIDLQELGKYEQYIKWPWYIWLGFIAGLIAIVMVTIMLCCMTSCCSCLKGCCSCGSCCKFDEDDSEPVLKGVKLHYT

SEQ ID NO: 63 - DNA, 1260 bp, Artificial Sequence
  ORF of the codon-optimized SARS-CoV-2 N antigen of B.1.617 variant
atgtctgataacggaccacagaatcagcgaaacgcaccacgcattacgtttggtggaccctcagattcaactggcagtaaccagaatggagaacgcagtggagcgcgatctaaacaacgtcggcctcaaggtttacccaataatactgcgtcttggttcaccgctctcactcaacatggcaaggaagaccttaaattccctcgaggacaaggcgttccaattaacaccaatagcagtccagatgaccaaattggctactaccgaagagctaccagacgaattcgtggtggtgacggtaagatgaaagatctcagtccaagatggtatttctactacctaggaactgggccagaagctggacttccctatggtgctaacaaagacggcatcatatgggttgcaactgagggagccttgaatacacctaaagatcacattggcacccgcaatcctgctaacaatgctgcaatcgtgctacaacttcctcaaggaacaacattgcctaaaggcttctacgcagaagggagcagaggcggcagtcaagcctcttctcgttcctcatcacgtagtcgcaacagttcaagaaattcaactccaggcagcagtatgggaacttctcctgctagaatggctggcaatggcggtgatgctgctcttgctttgctgctgcttgacagattgaaccagcttgagagcaagatgtctggtaaaggccaacaacaacaaggccaaactgtcactaagaaatctgctgctgaggcttctaagaagcctcggcagaaacgtactgccactaaagcatacaatgtaacacaagctttcggcagacgtggtccagaacaaacccaaggaaactttggagaccaggaactaatcagacaaggaactgattacaaacattggccgcaaattgcacaatttgctcccagcgcttcagcgttcttcggaatgtcgcgcattggcatggaagtcacaccttcgggaacgtggttgacctacacaggtgccatcaaattggatgacaaagatccaaatttcaaagatcaagtcatattgctgaataagcatattgacgcatacaagacattcccaccaacagagcctaagaaggacaagaagaagaaggcttatgaaactcaagccttaccgcagagacagaagaaacagcaaactgtgactcttcttcctgctgcagatttggatgatttctccaaacaattgcaacaatccatgagcagtgctgactcaactcaggcctaa

SEQ ID NO: 64 - protein, 419 aa, Artificial Sequence
  encoded protein sequence of the codon-optimized SARS-CoV-2 N antigen sequence of the B.1.617 variant
  MISC_FEATURE (203)..(203): methionine
  MISC_FEATURE (377)..(377): tyrosine
MSDNGPQNQRNAPRITFGGPSDSTGSNQNGERSGARSKQRRPQGLPNNTASWFTALTQHGKEDLKFPRGQGVPINTNSSPDDQIGYYRRATRRIRGGDGKMKDLSPRWYFYYLGTGPEAGLPYGANKDGIIWVATEGALNTPKDHIGTRNPANNAAIVLQLPQGTTLPKGFYAEGSRGGSQASSRSSSRSRNSSRNSTPGSSMGTSPARMAGNGGDAALALLLLDRLNQLESKMSGKGQQQQGQTVTKKSAAEASKKPRQKRTATKAYNVTQAFGRRGPEQTQGNFGDQELIRQGTDYKHWPQIAQFAPSASAFFGMSRIGMEVTPSGTWLTYTGAIKLDDKDPNFKDQVILLNKHIDAYKTFPPTEPKKDKKKKAYETQALPQRQKKQQTVTLLPAADLDDFSKQLQQSMSSADSTQA

SEQ ID NO: 65 - protein, 19 aa, Artificial Sequence
  SARS-CoV-2 S antigen
KFDEDDSEPVLKGVKLHYT

SEQ ID NO: 66 - DNA, 215 bp, Artificial Sequence
  CR/HL/CR
  misc_feature (1)..(20): CR/HL/CR
  misc_feature (25)..(190): duplex copy of MVA terminal HL
  misc_feature (196)..(215): CR/HL/CR
tttttttctagacactaaataaatagtaagattaaattaattataaaattatgtatataatattaattataaaattatgtatatgatttactaactttagttagataaattaataatacataaattttagtatattaatattataaattaataatacataaattttagtatattaatattatattttaaatatttatttagtgtctagaaaaaaa

SEQ ID NO: 67 - DNA, 7 bp, Artificial Sequence
  downstream Vaccinia transcription termination signal
tttttat

SEQ ID NO: 68 - DNA, 73 bp, Artificial Sequence
  primer
aaaaaatatattatttttatgttattttgttaaaaataatcatcgaatacgaactagtataaaaaggcgcgcc

SEQ ID NO: 69 - DNA, 77 bp, Artificial Sequence
  primer
gaagataccaaaatagtaaagattttgctattcagtggactggatgattcaaaaattgaaaataaatacaaaggttc

SEQ ID NO: 70 - DNA, 80 bp, Artificial Sequence
  primer
atatgaatatgatttcagatactatatttgttcctgtagataataactaaaaatttttatctagtataaaaaggcgcgcc

SEQ ID NO: 71 - DNA, 80 bp, Artificial Sequence
  primer
ggaaaatttttcatctctaaaaaaagatgtggtcattagagtttgatttttataaaaattgaaaataaatacaaaggttc

SEQ ID NO: 72 - DNA, 79 bp, Artificial Sequence
  primer
ttggggaaatatgaacctgacatgattaagattgctctttcggtggctggtaaaaaattgaaaataaatacaaaggttc

SEQ ID NO: 73 - DNA, 70 bp, Artificial Sequence
  primer
acaaaattatgtattttgttctatcaactacctataaaactttccaaatactagtataaaaaggcgcgcc

SEQ ID NO: 74 - DNA, 44 bp, Artificial Sequence
  primer
  misc_feature (21)..(21): n is a, c, g, or t
tcgtggtgtgcctgaatcgandaggtagcgacttcaggtttctt

SEQ ID NO: 75 - DNA, 43 bp, Artificial Sequence
  primer
  misc_feature (22)..(22): n is a, c, g, or t
tatccaccaatccgagaccaandcctctggaccgcataatctg

SEQ ID NO: 76 - DNA, 51 bp, Artificial Sequence
  primer
  misc_feature (26)..(26): n is a, c, g, or t
aggtttgatcgttgtcatttctccandagagggatattaagtcgatagccg

SEQ ID NO: 77 - DNA, 19 bp, Artificial Sequence
  primer
tggaatgcgttccttgtgc

SEQ ID NO: 78 - DNA, 21 bp, Artificial Sequence
  primer
cgtttttcccattcgatacag

SEQ ID NO: 79 - DNA, 23 bp, Artificial Sequence
  primer
tatagtctttgtggcatccgttg

SEQ ID NO: 80 - DNA, 23 bp, Artificial Sequence
  primer
acccaaactttagtaaggccatg

SEQ ID NO: 81 - DNA, 20 bp, Artificial Sequence
  primer
ataagcgttgtcaaagcggg

SEQ ID NO: 82 - DNA, 23 bp, Artificial Sequence
  primer
aggaaatagaaattgttggtgcg

SEQ ID NO: 83 - DNA, 23 bp, Artificial Sequence
  primer
acattggcggacaatctaaaaac

SEQ ID NO: 84 - DNA, 25 bp, Artificial Sequence
  primer
atcatcggtggttgatttagtagtg

SEQ ID NO: 85 - DNA, 20 bp, Artificial Sequence
  primer
tatccaccaatccgagacca

SEQ ID NO: 86 - DNA, 25 bp, Artificial Sequence
  primer
gtctgtccgtcttctctattgttta

SEQ ID NO: 87 - DNA, 25 bp, Artificial Sequence
  primer
ttaactcagtttcaatacggtgcag

SEQ ID NO: 88 - DNA, 22 bp, Artificial Sequence
  primer
tggggtttcttctcaggctatc

SEQ ID NO: 89 - protein, 15 aa, Artificial Sequence
  peptide N26
MKDLSPRWYFYYLGT

SEQ ID NO: 90 - protein, 9 aa, Artificial Sequence
  HLA-B*0702 immunodominant N-specific peptide epitope
SPRWYFYYL
